(19) United States
(12) Patent Application Publication
(10) Pub. No.: US 2015/0275183 A1
(43) Pub. Date: Oct. 1, 2015

(54) Human Betacoronavirus Lineage C and Identification of N-Terminal Dipeptidyl Peptidase As Its Virus Receptor

(71) Applicant: ERASMUS UNIVERSITY MEDICAL CENTER ROTTERDAM, Rotterdam (NL)

(72) Inventors: Bartholomeus Leonardus Haagmans, Rotterdam (NL); Theodorus Marinus Bestebroer, Rotterdam (NL); Sander van Boheemen, Rotterdam (NL); Ronaldus Adrianus Maria Fouchier, Rotterdam (NL); Albertus Dominicus Marcellinus Erasmus Osterhaus, Rotterdam (NL); Ali Moh Zaki, Rotterdam (NL); Victor Stalin Raj, Rotterdam (NL); Berend Jan Bosch, Rotterdam (NL)

(21) Appl. No.: 14/430,010

(22) PCT Filed: Sep. 23, 2013
(86) PCT No.: PCT/IB2013/058772

§ 371 Date: Mar. 20, 2015

Related U.S. Application Data
(60) Provisional application No. 61/704,531, filed on Sep. 23, 2012.
(60) Provisional application No. 61/730,027, filed on Nov. 26, 2012.
(60) Provisional application No. 61/831,070, filed on Jun. 4, 2013.

(51) Int. Cl. C12N 7/00; C07K 16/10; G01N 33/573; C12N 9/48; C12Q 1/70; G01N 33/569; C07K 14/005; A61K 35/76

(52) U.S. Cl. CPC C12N 7/00; C07K 14/005; C07K 16/10; A61K 35/76; C12N 9/485; C12Q 1/701; G01N 33/56983; G01N 33/573; C12N 2770/20032; C12N 2770/20022; C12Y 304/14005; G01N 2500/02; G01N 2333/948; G01N 2333/165; C12Q 2600/158

(57) ABSTRACT

The invention provides an isolated essentially mammalian positive-sense single stranded RNA virus classifiable as belonging to the Order: Nidovirales; Family: Coronaviridae; Subfamily: Coronavirinae; Genus: Betacoronavirus; and non-Lineage A, non-Lineage B or non-Lineage D, human betacoronavirus. The invention also provides a human virus having a receptor binding domain (RBD) capable of binding to a dipeptidyl peptidase 4. The invention also provides diagnostic means and methods, prophylactic means and methods and therapeutic means and methods to be employed in the diagnosis, prevention and/or treatment of disease, in particular of respiratory disease, in particular of mammals, more in particular in humans.

[0001] The invention provides a new previously undescribed Coronavirus isolated from cases of unexplained disease in September 2012 and identified herein as belonging to a newly recognized and previously undescribed species of human Corona Virus (HCoV), herein identified as HCoV-SA1 or HCoV EMC or Middle East Respiratory Syndrome-Coronavirus (MERS-CoV). In particular the nucleic acid and/or amino acid sequences of the MERS-CoV genome and sequences specifically encoding (parts of) viral proteins and antigenic polypeptides are provided. Further, the invention relates to diagnostic means and methods, prophylactic means and methods and therapeutic means and methods to be employed in the diagnosis, prevention and/or treatment of disease, in particular of respiratory disease, in particular of mammals, more in particular in humans. It particularly also relates to an isolated virus and its receptor.

[0002] A fundamental yet unresolved puzzle in virology is how viruses evolve to recognize their receptor proteins on the cells they need to enter in order to replicate. Specifically, how do different viruses recognize the same receptor protein and how do similar viruses recognize different receptor proteins? Do viruses select their receptor proteins by chance or do they target specific virus binding hotspots on these receptor proteins? Structural information of virus-receptor interfaces can potentially answer these questions. To date, although a few studies have obtained structural information for a single virus-receptor interface, even less studies have provided structural information for the interfaces between different viruses and their common receptor protein.

[0003] The invention in particular relates to coronaviruses that are the second leading cause of adult colds. Of the more than 30 kinds, three or four infect humans. The 2003 SARS virus is a coronavirus. Coronaviruses are rather difficult to grow in the laboratory, so they have not been studied to the same extent as other viruses. NL63 coronavirus (NL63 CoV), a prevalent human respiratory virus, is a group I coronavirus known to use angiotensin converting enzyme 2 (ACE2, a cell membrane bound carboxy terminal dipeptidyl peptidase) as its receptor. Incidentally, ACE2 is also used by group II SARS coronavirus (SARS CoV).

[0004] The distribution of coronavirus receptors is critical to the pathogenic outcome of the disease they cause. In this regard, it is notable that coronavirus spikes exhibit a wide range of receptor specificities; human aminopeptidase N (a metalloprotease) is a receptor for human coronavirus 229E, mouse hepatitis virus enters after binding members of a pleiotropic family of carcinoembryonic antigen cell adhesion molecules (CEACAMs); feline and porcine coronaviruses also bind various metalloproteases; and bovine coronaviruses recognize 9 O acetylated sialic acids.

[0005] Coronaviruses enter cells through a large spike protein on their envelopes. The coronavirus spike protein is a membrane anchored trimer and contains two subunits, receptor binding subunit S1 and membrane fusion subunit S2. The S2 subunits from group I and group II coronaviruses share both sequence and structural homology; they contain homologous heptad repeat segments that fold into a conserved trimers of hairpin structure, which is essential for membrane fusion. Surprisingly, the S1 subunits from group I and group II coronaviruses have no obvious sequence homology. Nevertheless, they can be divided approximately into N terminal region, central region, and C terminal region. Coronaviruses are believed to have common ancestors because they share similar replication mechanisms, genomic structures, and overall gene sequences.

[0006] Among all of the coronavirus genes, the one encoding the spike protein is the most variable. Between the spike protein subunits, S1 is more variable than S2. The current structural divergences of the S1 subunits reveal the tremendous evolutionary pressure that coronaviruses face to adapt to different host receptors, and they also reflect on the evolutionary history of coronaviruses and their receptor selections.

[0007] In general, coronaviruses are well known and most of those who are diagnosed with it recover completely with no complications after receiving the needed supportive therapy. However, in some of the patients who are infected, serious complications can develop affecting the respiratory system and the kidneys and can cause death, especially among the elderly and in patients with chronic respiratory and cardiac conditions and among immune compromised patients.

[0008] Coronaviruses (CoVs), a genus of the Coronaviridae family, are positive strand RNA viruses with the largest viral genome of all RNA viruses (27-32 Kb). The genomic RNA is capped, polyadenylated and covered with nucleocapsid proteins. The virus is enveloped and carries large spike glycoproteins. All CoVs employ a common genome organization where the replicase gene encompasses the 5′ two thirds of the genome and is comprised of two overlapping open reading frames (ORFs), ORF1a and ORF1b.

[0009] The structural gene region, which covers the 3′ third of the genome, encodes the canonical set of structural protein genes in the order 5′ spike (S) envelope (E) membrane (M) and nucleocapsid (N)-3′. Some beta CoVs carry an additional structural protein encoding a hemagglutinin esterase (HE). The gene is located between the ORF1b and S gene. Expression of the nonstructural replicase proteins is mediated by translation of the genomic RNA that gives rise to the biosynthesis of two large polyproteins, pp1a (encoded by ORF1a) and pp1ab (encoded by ORF1a and ORF1b) facilitated by a ribosomal frame shift at the ORF1a/1b junction.

[0010] In contrast, the structural proteins are translated from sub genomic (sg) mRNAs. These sg mRNAs are the result of discontinuous transcription, a hallmark of CoV gene expression. The structural gene region also harbors several ORFs that are interspersed along the structural protein coding genes. The number and location of these accessory ORFs varies between the CoV species.

[0011] Although coronaviruses were first identified nearly 60 years ago, they only received notoriety in 2003 when one of their members was identified as the aetiological agent of severe acute respiratory syndrome (SARS). Previously these viruses were known to be important agents of respiratory and enteric infections of domestic and companion animals and to cause approximately 15% of all cases of the common cold. Coronaviruses (CoVs), a genus of the Coronaviridae family, are positive strand RNA viruses with the largest viral genome of all RNA viruses (27-32 Kb). The genomic RNA is capped, polyadenylated and covered with nucleocapsid proteins. The virus is enveloped and carries large spike glycoproteins. All CoVs employ a common genome organization where the replicase gene encompasses the 5′-two thirds of the genome and is comprised of two overlapping open reading frames (ORFs), ORF1a and ORF1b. The structural gene region, which covers the 3′-third of the genome, encodes the canonical set of structural protein genes in the order 5′-spike (S)-envelope (E)-membrane (M) and nucleocapsid (N)-3′. Some beta-CoVs carry an additional structural protein encoding a heamagglutinin-esterase (HE). The gene is located between the ORF1b and S gene. Expression of the nonstructural replicase proteins is mediated by translation of the genomic RNA that gives rise to the biosynthesis of two large polyproteins, pp1a (encoded by ORF1a) and pp1ab (encoded by ORFla and ORF1b) facilitated by a ribosomal frame shift at the ORF1a/1b junction. In contrast, the structural proteins are translated from sub genomic (sg) mRNAs. These sg mRNAs are the result of discontinuous transcription, a hallmark of CoV gene expression. The structural gene region also harbors several ORFs that are interspersed along the structural protein coding genes. The number and location of these accessory ORFs varies between the CoV species. In animals CoV infections can lead to a variety of syndromes, e.g. bronchitis, gastroenteritis, progressive demyelinating encephalitis, diarrhea, peritonitis and respiratory tract disease. The first reports on human CoVs (HCoV) appeared in the mid-1960s. The human viruses were isolated from persons with common cold, and two species were detected: HCoV-229E and HCoV-OC43. Almost 40 years later, SARS-CoV was identified as the causative agent of the Severe Acute Respiratory Syndrome (SARS). A highly effective global public health response prevented further spread of this virus, and as a result SARS-CoV was eradicated from the human population. Soon thereafter it became clear that there are more HCoVs. HCoV-NL63 was identified in 2004 and HCoV-HKU1 in 2005. Both viruses are not emerging viruses like SARS-CoV but were previously unidentified. In fact, infections by these viruses are as common and wide spread as HCoV-229E and HCoV-OC43 infections. The SARS outbreak intensified the research on the unknown animal CoVs. As much as 16 new animal CoV species were identified till 2008. There are currently at around 29 complete reference genome sequences available in Genbank of the various viruses. Recently, the Coronavirus Study Group of the International Committee for Taxonomy of Viruses has proposed renaming the traditional group 1, 2, and 3 coronaviruses into the genus Alphacoronavirus, Betacoronavirus, and Gammacoronavirus, respectively (http://talk.ictvonline.org/media/p/1230.aspx). Each genus is subdivided into different species on the basis of sequence identity in the replicase domains of the polyprotein pp1ab.

[0012] The classification of the family Coronaviridae and the organization of the established subfamily Coronavirinae is based upon rooted phylogeny and pair-wise comparisons using Coronaviridae-wide conserved domains in replicase polyprotein pp1ab as well as the structural proteins S, E, M and N. In rooted trees, the proposed genera Alpha-, Beta- and Gammacoronavirus consistently form three distinct monophyletic groups and in pair-wise comparisons, they form three robust non-overlapping clusters. The inter-group pair-wise scores for coronaviruses are comparable to those calculated for structural and non-structural proteins of different genera in other RNA virus families (e.g. Potyviridae, Picornaviridae). Based on this defacto criterion phylogroups 1 through 3 are named into genera designated Alpha-, Beta and Gammacoronavirus, respectively. The 90% aa sequence identity threshold now proposed as a species demarcation criterion within each genus has been determined from the analysis of pair-wise aa distances in seven conserved replicase domains (nsp3 ADRP, nsp5 (3CLpro), nsp12 (RdRp), nsp13 (Hell), nsp14 (ExoN), nsp15 (NendoU) and nsp16 (0-MT)) of 156 viruses in the Coronaviridae. In this analysis, 20 distinct groups (17 coronaviruses, 2 toroviruses, 1 bafinivirus) are unambiguously recognized as non-overlapping clusters (with the largest intra-cluster distance being smaller than the smallest inter-cluster distance). Of these clusters, at least 7 fall into the genus Betacoronavirus, each of which represents a distinct betacoronavirus species (Betacoronavirus 1, Murine coronavirus, Human coronavirus HKU1, Rousettus bat coronavirus HKU9, Tylonycteris bat coronavirus HKU4, Pipistrellus bat coronavirus HKU5, Severe acute respiratory syndrome-related coronavirus (SARS-CoV). The Betacoronavirus genus is additionally considered to contain 4 lineages (A, B, C and D). Human coronaviruses HCoV-HKU1 and HCoV-OC43 belong to lineage A while human coronavirus SARS-CoV belongs to lineage B. Lineage C and D are not known to contain any human representatives. Other human coronaviruses, such as HCoV-NL63 and HCoV-229E, are even more distinct since these two human pathogens belong to a different genus, the Alphacoronavirus genus.

[0013] The invention also relates to so called “pull down” experiments, which are methods for the identification of protein protein interactions based on affinity purification of interacting proteins from complex proteinaceous substances such as cellular extracts. Pull down experiments with, for example, fusion proteins attached to inert beads are a screening technique for isolating proteinaceous substances having specific protein components that bind to each other and thus lead to identification of protein protein interactions.

[0014] Typically, pull down experiments are used to identify interactions between a probe protein and unknown targets and to confirm suspected interactions between a probe protein and a known protein. When coupled with peptide digests of pulled down proteins and with mass spectrometry to sequence those peptides and identify targets, pull downs can be considered as the protein based equivalent of a yeast two hybrid screen.

[0015] To improve the isolation of specific binding partners, pull down methods have been developed involving the use of cross linking, of large scale tissue lysates, and of spin columns. Appropriate methods of sample preparation for mass spectrometry based identification of interacting proteins have been developed as well, including specialized gel staining techniques, band excision, and in gel tryptic digestion. Data interpretation and most commonly encountered problems are, for example, discussed in Current Protocols in Cell Biology, “UNIT 17.5 Protein Protein Interactions Identified by Pull Down Experiments and Mass Spectrometry,” Adam Brymora, Valentina A. Valova, and Phillip J. Robinson, Published Online: 1 May 2004 DOI: 10.1002/0471143030.cb1705s22, and included herein by reference.

[0016] The Invention

[0017] The invention provides an isolated essentially mammalian positive-sense single stranded RNA virus classifiable as belonging to the Order: Nidovirales; Family: Coronaviridae; Subfamily: Coronavirinae; Genus: Betacoronavirus; and non-Lineage A, non-Lineage B or non-Lineage D, human betacoronavirus. The invention also provides a human virus (the prefix human stands for the virus classified as capable of infecting humans where a bat virus is capable of infecting bats), preferably isolated or isolatable from humans, having a receptor binding domain (RBD) capable of binding to a dipeptidyl peptidase 4 (DPP4), no such isolates have been deposited or in any other way made available to the art until now. In particular, the invention provides an isolated essentially mammalian positive-sense single stranded RNA virus classifiable as belonging to the Order: Nidovirales; Family: Coronaviridae; Subfamily: Coronavirinae; Genus: Betacoronavirus; Lineage C human betacoronavirus. The invention also provides an isolated essentially mammalian positive-sense single stranded RNA virus classifiable as belonging to the Order: Nidovirales; Family: Coronaviridae; Subfamily: Coronavirinae; Genus: Betacoronavirus; Lineage: C and isolatable from humans, and components thereof. Until now, no Betacoronavirus isolates have been isolated from humans that were then classified as belonging to Lineage: C of Betacoronavirus. In particular, the invention provides a Lineage: C human Betacoronavirus having a receptor binding domain (RBD) capable of binding to a dipeptidyl peptidase 4 (DPP4). In particular, no such isolates have been deposited or in any other way made available to the art until now. In a preferred embodiment, a virus according to the invention is isolated or isolatable from a human. In particular, the invention provides a new previously undescribed Coronavirus isolated from cases of unexplained disease in September 2012 and identified herein as belonging to a newly recognized and previously undescribed species of human Corona Virus (HCoV), herein identified as HCoV-SA1 or HCoV EMC or Middle East Respiratory Syndrome-Coronavirus (MERS-CoV). In particular the specific nucleic acid and/or amino acid sequences of the MERS-CoV genome and sequences encoding (parts of) viral proteins and antigenic polypeptides are provided, as demonstrated by phylogenetic analyses. Further, the invention relates to diagnostic means and methods, prophylactic means and methods and therapeutic means and methods to be employed in the diagnosis, prevention and/or treatment of disease, in particular of respiratory disease, in particular of mammals, more in particular in humans, most in particular specific for MERS-CoV. It particularly also relates to an isolated virus and its receptor. The invention also provides identification of N-terminal dipeptidyl peptidase as virus receptor and uses thereof, identification of the receptor binding domain of MERS-CoV mapping to a 231-residue region 2 in the spike protein that efficiently elicits neutralizing antibodies identification and uses thereof and dipeptidyl peptidase 4 receptor determinants of respiratory MERS-coronavirus infection, and uses thereof. The invention in particular provides specific diagnostics of MERS-CoV, sub-unit compositions of S1-MERS CoV protein for vaccine purposes, screening tests for detecting compounds capable of interfering with MER-CoV-DPP4 binding, and animal models for determining activity of compounds capable of interfering with MERS-CoV-DPP4 binding.

[0018] The invention also provides a virus according to the invention comprising one or more of a nucleic acid or fragment thereof selected from any of FIGS. 3 or 5 to 15, preferably wherein said virus provided herein is having an amino acid sequence of its conserved replicase domain that is at least 75%, more preferably at least 80%, more preferably at least 85%, more preferably at least 90%, most preferably at least 95% identical with the amino acid sequence of the conserved replicase domain of an isolated essentially mammalian positive-sense single stranded RNA virus classifiable as belonging to the Order: Nidovirales; Family: Coronaviridae; Subfamily: Coronavirinae; Genus: Betacoronavirus; Lineage C isolatable from humans and comprising one or more of the sequences selected from any of FIGS. 3 or 5 to 15, preferably wherein said conserved replicase domain comprises ORF1ab.

[0019] The invention also provides a virus according to the invention having an amino acid sequence of its receptor binding domain that is at least 75%, more preferably at least 80%, more preferably at least 85%, more preferably at least 90%, most preferably at least 95% identical with the amino acid sequence of the receptor binding domain of an isolated essentially mammalian positive-sense single stranded RNA virus classifiable as belonging to the Order: Nidovirales; Family: Coronaviridae; Subfamily: Coronavirinae; Genus: Betacoronavirus; Lineage C isolatable from humans and comprising one or more of the sequences selected from any of FIGS. 3 or 5 to 15, preferably wherein said receptor domain comprises residues 1 747 of the S1 spike protein, preferably residues 358 588 of the S1 spike protein.

[0020] In a one embodiment, a virus is provided that belongs to the Coronaviruses, genus Betacoronavirus and is identifiable as phylogenetically corresponding or specific to the MERS-CoV thereto by determining a nucleic acid or amino acid sequence of said virus or fragments thereof and testing it in phylogenetic tree analyses wherein maximum likelihood trees are generated and finding it, the virus or fragment, to be more closely phylogenetically corresponding to a virus isolate or fragment thereof having the sequences as depicted in any of FIGS. 3 or 5 to 15 than it is corresponding to a bat coronavirus HKU4 or HKU5, or fragments thereof, in another embodiment, a virus is provided that belongs to the Coronaviruses and is identifiable as phylogenetically corresponding or specific to the MERS-CoV thereto by determining a nucleic acid sequence or amino acid sequence of said virus and testing it in phylogenetic tree analyses wherein maximum likelihood trees are generated and finding it to be more closely phylogenetically corresponding to a virus isolate isolatable from humans having the sequences as depicted in any of FIGS. 3 or 5 to 15 than it is corresponding to a human coronavirus virus isolate HCoV-HKU1 or HCoV-OC43 or SARS-CoV, or fragments thereof.

[0021] In a preferred embodiment, a virus is provided herein that belongs to the Coronaviruses, genus Betacoronavirus and is identifiable as phylogenetically corresponding thereto by determining a nucleic acid or amino acid sequence of said virus and testing it in phylogenetic tree analyses wherein maximum likelihood trees are generated and finding it to be more closely phylogenetically corresponding to a virus isolate having the sequences as depicted in any of FIGS. 3 or 5 to 15 than it is corresponding to a bat coronavirus HKU4 or HKU5 or to a human coronavirus virus isolate HCoV-HKU1 or HCoV-OC43 or SARS-CoV.

[0022] The invention also provides a cell, preferably a host cell, and a culture of such a cell or host cell, i.e. a cultured cell, comprising a virus according to the invention. Preferred examples of such cells and cell cultures comprise a Vero cell or LLC-MK2 cell and cultures thereof; other preferred examples comprise a Huh-7 cell, a primary nonciliated human airway epithelial cell, a primary human fibroblast, a primary human kidney cell, a primary human alveolar type 2 cell, or a primary kidney cell of Pipistrellus pipistrellu, and cultures of said cells.

[0023] The invention also provides a nucleic acid, preferably a cDNA, or MERS-CoV-specific fragment thereof obtainable, derived or obtained from an isolated essentially mammalian positive-sense single stranded RNA virus classifiable as belonging to the Order: Nidovirales; Family: Coronaviridae; Subfamily: Coronavirinae; Genus: Betacoronavirus; and non-Lineage A, non-Lineage B or non-Lineage D, human betacoronavirus. In a preferred embodiment, the invention provides a nucleic acid isolatable from a human virus, preferably isolatable from humans, having a receptor binding domain (RBD) capable of binding to a dipeptidyl peptidase 4 (DPP4), In particular, a nucleic acid is provided by the invention obtainable, derived or obtained from an isolated essentially mammalian positive-sense single stranded RNA virus classifiable as belonging to the Order: Nidovirales; Family: Coronaviridae; Subfamily: Coronavirinae; Genus: Betacoronavirus; Lineage C human betacoronavirus. a nucleic acid is provided by the invention obtainable, derived or obtained from an isolated essentially mammalian positive-sense single stranded RNA virus classifiable as belonging to the Order: Nidovirales; Family: Coronaviridae; Subfamily: Coronavirinae; Genus: Betacoronavirus; Lineage: C and isolatable from humans, and components thereof. Until now, no Betacoronavirus isolates have been isolated from humans that were then classified as belonging to Lineage: C of Betacoronavirus. In particular, a nucleic acid is provided by the invention obtainable, derived or obtained from a Lineage: C Betacoronavirus having a receptor binding domain (RBD) capable of binding to a dipeptidyl peptidase 4 (DPP4), preferably from a virus having a nucleic acid sequence at least 75%, more preferably at least 80%, more preferably at least 85%, more preferably at least 90%, most preferably at least 95% identical with a nucleic acid sequence provided in FIG. 3 or FIGS. 5 to 15. In particular, a MERS-CoV specific fragment of a nucleic acid, RNA or DNA or cDNA is provided by the invention which comprises one or more of the sequences of MERS-CoV as depicted in FIGS. 3, or 5 to 15 or a nucleic acid sequence which can hybridize with any of these sequences under stringent conditions. The invention also provides a vector comprising a nucleic acid according to the invention, and a host cell comprising a nucleic acid according to the invention or a vector according to the invention.

[0024] The invention also provides an isolated or recombinant proteinaceous molecule or MERS-CoV-specific fragment thereof encoded by a nucleic acid according to the invention. In a preferred embodiment, the invention provides a proteinaceous molecule or MERS-CoV-specific viral protein or fragment thereof encoded by a nucleic acid according to the invention. Useful proteinaceous molecules are for example derived from any of the genes or genomic fragments or open reading frames (ORFs) derivable from a virus according to the invention. Such molecules, or antigenic fragments thereof, as provided herein, are for example useful in diagnostic methods or kits and in pharmaceutical compositions such as sub-unit vaccines and inhibitory peptides. Particularly useful is the viral polymerase protein, the spike protein, the nucleocapsid or antigenic fragments thereof for inclusion as antigen or subunit immunogen in a vaccine, but inactivated whole virus can also be used. Particularly useful are also those proteinaceous substances that are encoded by recombinant nucleic acid fragments that are identified by phylogenetic analyses as being MERS-CoV specific fragments, of course preferred are those that are within the preferred bounds and metes of ORFs useful in phylogenetic analyses, in particular for eliciting MERS-CoV specific antibodies, whether in vivo (e.g. for protective purposes or for providing diagnostic antibodies) or in vitro (e.g. by phage display technology or another technique useful for generating synthetic antibodies).

[0025] In one embodiment, the invention provides a viral replicase or MERS-CoV-specific fragment thereof having an amino acid sequence at least 75%, more preferably at least 80%, more preferably at least 85%, more preferably at least 90%, most preferably at least 95% identical with an amino acid sequence provided in FIG. 13, said viral replicase or MERS-CoV-specific fragment thereof preferably encoded by an RNA or DNA or cDNA sequence or fragments or homologues thereof as provided herein, having a nucleic acid sequence at least 75%, more preferably at least 80%, more preferably at least 85%, more preferably at least 90%, most preferably at least 95% identical with a nucleic acid sequence provided in FIG. 13.

[0026] In another embodiment, the invention provides a viral spike protein or MERS-CoV-specific fragment thereof having an amino acid sequence at least 75%, more preferably at least 80%, more preferably at least 85%, more preferably at least 90%, most preferably at least 95% identical with an amino acid sequence provided in FIG. 12, said viral spike protein or MERS-CoV-specific fragment thereof preferably encoded by an RNA or DNA or cDNA sequence or fragments or homologues thereof as provided herein, having a nucleic acid sequence at least 75%, more preferably at least 80%, more preferably at least 85%, more preferably at least 90%, most preferably at least 95% identical with a nucleic acid sequence provided in FIG. 12.

[0027] In another embodiment, the invention provides an S1 spike protein or MERS-CoV-specific fragment thereof having an amino acid sequence at least 75%, more preferably at least 80%, more preferably at least 85%, more preferably at least 90%, most preferably at least 95% identical with an amino acid sequence provided for residues 1 588 in FIG. 17.

[0028] In another embodiment, the invention provides an S1 spike protein or MERS-CoV-specific fragment thereof having an amino acid sequence at least 75%, more preferably at least 80%, more preferably at least 85%, more preferably at least 90%, most preferably at least 95% identical with an amino acid sequence provided for residues 1 357 in FIG. 17.

[0029] In another embodiment, the invention provides an S1 spike protein or MERS-CoV-specific fragment thereof having an amino acid sequence at least 75%, more preferably at least 80%, more preferably at least 85%, more preferably at least 90%, most preferably at least 95% identical with an amino acid sequence provided for residues 358 747 in FIG. 17.

[0030] In another embodiment, the invention provides an S1 spike protein or MERS-CoV-specific fragment thereof having an amino acid sequence at least 75%, more preferably at least 80%, more preferably at least 85%, more preferably at least 90%, most preferably at least 95% identical with an amino acid sequence provided for residues 358-588 in FIG. 17.

[0031] In another embodiment, the invention provides an S1 spike protein or MERS-CoV-specific fragment thereof having an amino acid sequence at least 75%, more preferably at least 80%, more preferably at least 85%, more preferably at least 90%, most preferably at least 95% identical with an amino acid sequence provided for residues 589 747 in FIG. 17.

[0032] In another embodiment, the invention provides an S1 spike protein or MERS-CoV-specific fragment thereof having an amino acid sequence at least 75%, more preferably at least 80%, more preferably at least 85%, more preferably at least 90%, most preferably at least 95% identical with an amino acid sequence provided for residues 1 747 in FIG. 17.

[0033] In another embodiment, the invention provides an S1 spike protein or MERS-CoV-specific fragment thereof having an amino acid sequence at least 75%, more preferably at least 80%, more preferably at least 85%, more preferably at least 90%, most preferably at least 95% identical with an amino acid sequence provided for residues 1 747 in FIG. 17.

[0034] In another embodiment, the invention provides a viral non-structural gene protein or MERS-CoV-specific fragment thereof having an amino acid sequence at least 75%, more preferably at least 80%, more preferably at least 85%, more preferably at least 90%, most preferably at least 95% identical with an amino acid sequence provided in FIG. 8, said viral non-structural gene protein or MERS-CoV-specific fragment preferably encoded by an RNA or DNA or cDNA sequence or fragments or homologues thereof as provided herein, having a nucleic acid sequence at least 75%, more preferably at least 80%, more preferably at least 85%, more preferably at least 90%, most preferably at least 95% identical with a nucleic acid sequence provided in FIG. 8.

[0035] In another embodiment, the invention provides a viral non-structural gene protein or MERS-CoV-specific fragment thereof having an amino acid sequence at least 75%, more preferably at least 80%, more preferably at least 85%, more preferably at least 90%, most preferably at least 95% identical with an amino acid sequence provided in FIG. 9, said viral non-structural gene protein or MERS-CoV-specific fragment preferably encoded by an RNA or DNA or cDNA sequence or fragments or homologues thereof as provided herein, having a nucleic acid sequence at least 75%, more preferably at least 80%, more preferably at least 85%, more preferably at least 90%, most preferably at least 95% identical with a nucleic acid sequence provided in FIG. 9.

[0036] In another embodiment, the invention provides a viral non-structural gene protein or MERS-CoV-specific fragment thereof having an amino acid sequence at least 75%, more preferably at least 80%, more preferably at least 85%, more preferably at least 90%, most preferably at least 95% identical with an amino acid sequence provided in FIG. 10, said viral non-structural gene protein or MERS-CoV-specific fragment preferably encoded by an RNA or DNA or cDNA sequence or fragments or homologues thereof as provided herein, having a nucleic acid sequence at least 75%, more preferably at least 80%, more preferably at least 85%, more preferably at least 90%, most preferably at least 95% identical with a nucleic acid sequence provided in FIG. 10.

[0037] In another embodiment, the invention provides a viral non-structural gene protein or MERS-CoV-specific fragment thereof having an amino acid sequence at least 75%, more preferably at least 80%, more preferably at least 85%, more preferably at least 90%, most preferably at least 95% identical with an amino acid sequence provided in FIG. 11, said viral non-structural gene protein or MERS-CoV-specific fragment preferably encoded by an RNA or DNA or cDNA sequence or fragments or homologues thereof as provided herein, having a nucleic acid sequence at least 75%, more preferably at least 80%, more preferably at least 85%, more preferably at least 90%, most preferably at least 95% identical with a nucleic acid sequence provided in FIG. 11.

[0038] In another embodiment, the invention provides a viral small envelope (E) protein or MERS-CoV-specific fragment thereof having an amino acid sequence at least 75%, more preferably at least 80%, more preferably at least 85%, more preferably at least 90%, most preferably at least 95% identical with an amino acid sequence provided in FIG. 7, said viral small envelope (E) protein or MERS-CoV-specific fragment preferably encoded by an RNA or DNA or cDNA sequence or fragments or homologues thereof as provided herein, having a nucleic acid sequence at least 75%, more preferably at least 80%, more preferably at least 85%, more preferably at least 90%, most preferably at least 95% identical with a nucleic acid sequence provided in FIG. 7.

[0039] In another embodiment, the invention provides a viral matrix (M) protein or MERS-CoV-specific fragment thereof having an amino acid sequence at least 75%, more preferably at least 80%, more preferably at least 85%, more preferably at least 90%, most preferably at least 95% identical with an amino acid sequence provided in FIG. 6, said viral matrix (M) protein or MERS-CoV-specific fragment preferably encoded by an RNA or DNA or cDNA sequence or fragments or homologues thereof as provided herein, having a nucleic acid sequence at least 75%, more preferably at least 80%, more preferably at least 85%, more preferably at least 90%, most preferably at least 95% identical with a nucleic acid sequence provided in FIG. 6.

[0040] In another embodiment, the invention provides a nucleocapsid (N) protein or MERS-CoV-specific fragment thereof having an amino acid sequence at least 75%, more preferably at least 80%, more preferably at least 85%, more preferably at least 90%, most preferably at least 95% identical with an amino acid sequence provided in FIG. 5, said nucleocapsid (N) protein or MERS-CoV-specific fragment preferably encoded by an RNA or DNA or cDNA sequence or fragments or homologues thereof as provided herein, having a nucleic acid sequence at least 75%, more preferably at least 80%, more preferably at least 85%, more preferably at least 90%, most preferably at least 95% identical with a nucleic acid sequence provided in FIG. 5.

[0041] The invention also provides an antigen comprising a proteinaceous molecule or MERS-CoV-specific fragment thereof as provided herein. In a preferred embodiment, said proteinaceous molecule comprises or consists of a nucleocapsid (N) protein or MERS-CoV-specific fragment thereof as provided herein, or a viral matrix (M) protein or MERS-CoV-specific fragment thereof as provided herein, or a viral small envelope (E) protein or MERS-CoV-specific fragment thereof as provided herein, or a viral non-structural gene protein or MERS-CoV-specific fragment as provided herein, or an S1 spike protein or MERS-CoV-specific fragment thereof as provided herein, or a viral spike protein or MERS-CoV-specific fragment thereof as provided herein or of a viral replicase or MERS-CoV-specific fragment thereof as provided herein.

[0042] Also provided herein are antibodies, be it natural polyclonal or monoclonal, or synthetic (e.g. (phage) library-derived binding molecules) antibodies that specifically react with an antigen comprising a proteinaceous molecule or MERS-CoV-specific fragment thereof according to the invention. A person skilled in the art will be able to develop (monoclonal) antibodies using isolated virus material anchor recombinantly expressed viral proteins. In particular the invention provides a rabbit antibody specifically directed against an antigen according to the invention, rabbits being particularly well suited to raise antibodies against an antigen according to the invention. Such antibodies are also useful in a method for identifying a viral isolate as a MERS-CoV comprising reacting said viral isolate or a component thereof with an antibody as provided herein. This can for example be achieved by using purified or non-purified MERS-CoV or parts thereof (proteins, peptides) using ELISA, RIA, FACS or similar formats of antigen detection assays (Current Protocols in Immunology). Alternatively, infected cells or cell cultures may be used to identify viral antigens using classical immunofluorescence or immunohistochemical techniques. Specifically useful in this respect are antibodies raised against MERS-CoV proteins or peptides which are encoded by a nucleotide sequence comprising one or more of the fragments disclosed in FIGS. 3 and 5 to 15. Antibodies, both monoclonal and polyclonal, or fragments thereof, can also be used for detection purpose in the present invention, for example, in immunoassays in which they can be utilized in liquid phase or bound to a solid phase carrier. In addition, the monoclonal antibodies in these immunoassays can be detectably labeled in various ways. A variety of immunoassay formats may be used to select antibodies specifically reactive with a particular protein (or other analyte). For example, solid-phase ELISA immunoassays are routinely used to select monoclonal antibodies specifically immunoreactive with a protein. See Harlow and Lane, Antibodies, A Laboratory Manual, Cold Spring Harbor Publications, New York (1988), for a description of immunoassay formats and conditions that can be used to determine selective binding. Examples of types of immunoassays that can utilize antibodies of the invention are competitive and non-competitive immunoassays in either a direct or indirect format. Examples of such immunoassays are the radioimmunoassay (RIA) and the sandwich (immunometric) assay. Detection of the antigens using the antibodies of the invention can be done utilizing immunoassays that are run in either the forward, reverse, or simultaneous modes, including immunohistochemical assays on physiological samples. Those of skill in the art will know, or can readily discern, other immunoassay formats without undue experimentation.

[0043] Antibodies can be bound to many different carriers and used to detect the presence of the target molecules. Examples of well-known carriers include glass, polystyrene, polypropylene, polyethylene, dextran, nylon, amylases, natural and modified celluloses, polyacrylamides, agaroses and magnetite. The nature of the carrier can be either soluble or insoluble for purposes of the invention. Those skilled in the art will know of other suitable carriers for binding monoclonal antibodies, or will be able to ascertain such using routine experimentation.

[0044] The invention also provides method for identifying a viral isolate as a Betacoronavirus, Lineage C comprising reacting said viral isolate or a component thereof with a nucleic acid according to the invention anchor with an antibody according to the invention. The invention for example provides a method for virologically diagnosing a MERS-CoV infection of an animal, in particular of a mammal, more in particular of a human being, comprising determining in a sample of said animal the presence of a viral isolate or component thereof by reacting said sample with a MERS-CoV specific nucleic acid or antibody according to the invention, and a method for serologically diagnosing a MERS-CoV infection of a mammal comprising determining in a sample of said mammal the presence of an antibody specifically directed against a MERS-CoV or component thereof by reacting said sample with a MERS-CoV-specific proteinaceous molecule or fragment thereof or an antigen according to the invention.

[0045] The invention also provides a diagnostic kit for diagnosing a MERS-CoV infection comprising a MERS-CoV, a MERS-CoV-specific nucleic acid, proteinaceous molecule or fragment thereof, antigen anchor an antibody according to the invention, and preferably a means for detecting said MERS-CoV, MERS-CoV-specific nucleic acid, proteinaceous molecule or fragment thereof, antigen anchor an antibody, said means for example comprising an excitable group such as a fluorophore or enzymatic detection system used in the art (examples of suitable diagnostic kit format comprise IF, ELISA, neutralization assay, RT-PCR assay). To determine whether an as yet unidentified virus component or synthetic analogue thereof such as nucleic acid, proteinaceous molecule or fragment thereof can be identified as MERS-CoV-specific, it suffices to analyze the nucleic acid or amino acid sequence of said component, for example for a stretch of said nucleic acid or amino acid, preferably of at least 10, more preferably at least 25, more preferably at least 40 nucleotides or amino acids (respectively), by sequence homology comparison with the provided MERS-CoV nucleic acid or amino acid sequences and with known non-MERS-CoV nucleic acid or amino acid sequences using for example phylogenetic analyses as provided herein. Depending on the degree of relationship with said MERS-CoV or non-MERS-CoV viral sequences, the component or synthetic analogue can be identified.

[0046] The invention also provides use of a virus according to the invention, anchor a nucleic acid according to the invention, a vector according to the invention, a host cell according the invention, a proteinaceous molecule or fragment thereof according to the invention, an antigen according to the invention, or an antibody according to the invention for the production of a pharmaceutical composition, preferably for the production of a pharmaceutical composition for therapeutical use, preferably for use in antiviral therapy, preferably for the treatment or prevention of a Betacoronavirus, Lineage C virus infection, preferably a human infection, preferably an infection with a MERS-Cov, or for the production of a pharmaceutical composition for the treatment or prevention of atypical pneumonia and/or renal failure, preferably wherein said atypical pneumonia and/or renal failure is a human disease. Preferably a peptide comprising part of the amino acid sequence of the spike protein as depicted in FIG. 17 (residues 358-588, comprising the essential receptor binding domain) is used for the preparation of a therapeutic or prophylactic peptide, preferably for inclusion in said pharmaceutical composition. Also preferably, a protein comprising the amino acid sequence of the spike protein as depicted in FIG. 17 (residues 358-588) is used for the preparation of a sub-unit vaccine. Furthermore, the nucleocapsid of Coronaviruses, as depicted in FIG. 5, is known to be particularly useful for eliciting cell-mediated immunity against Coronaviruses and can be used for the preparation of a sub-unit vaccine. The invention also comprises a pharmaceutical composition comprising a virus according to the invention, and/or a nucleic acid according to the invention, a vector according to the invention, a host cell according the invention, a proteinaceous molecule or fragment thereof according to the invention, an antigen according to the invention, or an antibody according to the invention.

[0047] The invention also provides a method for the treatment or prevention of a Betacoronavirus, Lineage C virus infection or for the treatment or prevention of atypical pneumonia comprising providing a mammal, preferably a human individual with a pharmaceutical composition according to the invention. Also, the invention provides a method for the treatment or prevention of atypical pneumonia and/or renal failure comprising providing an individual with a pharmaceutical composition according to the invention. In a preferred embodiment, a method for the treatment or prevention of a MERS-CoV infection is provided comprising providing a mammal with a pharmaceutical composition according the invention, preferably wherein said mammal is a rabbit. The invention also provides a method for in vivo determining of parameters of MERS-CoV infection, preferably for determining parameters of MERS-CoV-DPP4 interaction in an animal experiment, comprising providing a mammal with a pharmaceutical composition according to the invention, anchor with a virus according to the invention, and/or with a nucleic acid according to the invention, and/or with a vector according to the invention, and/or with a host cell according to the invention, and/or with a proteinaceous molecule or fragment thereof according to the invention, and/or with an antigen according to the invention, and/or with an antibody according to the invention, preferably wherein said mammal is a rabbit. It is herein found that rabbits have several advantages over other experimental animals in that they have a remarkably similar target sequence for MERS-CoV-DPP4-receptor interaction, resulting in proficient infection of a rabbit with MERS-CoV and thus ample chance to study various aspects and parameters of MERS-CoV-DPP4-receptor interaction that resemble those in humans, giving the rabbit experimental animal model a distinct advantage over other animal models, such as the ferret animal model. Phylogenetic analysis of the MERS-CoV binding region of DPP4 indicated that human, macaque, horse and rabbit DPP4 cluster together as do DPP4's from cattle, pig and bats, that are somewhat more distantly related. Small animals including ferret, mice and most likely hamsters, shown to resist MERS-CoV infection, are more divergent in the DPP4 virus binding region, which at least in the case of ferrets has consequences for MERS-CoV binding. Besides macaques, rabbits indeed are a potential animal model for MERS-CoV infection; ex vivo inoculation of rabbit lung and kidney tissues revealed susceptibility to MERS-CoV. Similarly, the invention provides a method for in vivo determining of parameters of MERS-CoV infection, preferably for determining parameters of protection against MERS-CoV-infection, comprising providing a mammal with a pharmaceutical composition according to the invention, and/or with a virus according to the invention, and/or with a nucleic acid according to the invention, and/or with a vector according to the invention, and/or with a host cell according to the invention, and/or with a proteinaceous molecule or fragment thereof according to the invention, and/or with an antigen according to the invention, and/or with an antibody according to the invention, preferably wherein said mammal is a rabbit. In particular, a rabbit model is a model of choice for testing a pharmaceutical composition comprising a subunit peptide vaccine comprising part of the amino acid sequence of the spike protein as depicted in FIG. 17 (fragments of residues 358-588, comprising the essential receptor binding domain) which is used for the preparation of a therapeutic or prophylactic peptide for the preparation of a sub-unit vaccine. Vaccinating or immunizing rabbits with variant peptide vaccines and then challenging vaccinated and control rabbits with MERS-CoV that allows rapid infection and measurement of essential parameters such as development of (neutralizing) antibodies in experimental and control rabbits, development of protection against MERS-CoV infection or against MERS-CoV transmission allows for relatively inexpensive and rapid vaccine development studies, thereby allowing rapid vaccine development against human MERS-CoV infections. Attenuation of the virus by serial passage of MERS-CoV can now preferably achieved in rabbits by established methods developed for this purpose, including but not limited to the use of related viruses of other species, serial passages through other laboratory animals or/and tissue/cell cultures, serial passages through cell cultures at temperatures below 37 C (cold-adaption), site directed mutagenesis of molecular clones and exchange of genes or gene fragments between related viruses.

[0048] Now, as herein provided, a new human coronavirus was isolated from a patient with pneumonia. The virus was isolated from sputum of a male patient aged 60 years old presenting with pneumonia associated with acute renal failure. The virus grows readily on Vero cells and LLC-MK2 cells producing CPE in the form of rounding and syncytia formation and uses dipeptidyl peptidase 4 (DPP4) as a viral receptor for entry into cells establishing infection.

[0049] The clinical isolate was initially tested for influenza virus A, influenza virus B, parainfluenza virus, enterovirus and adenovirus, with negative results. Testing with a pancoronavirus RT-PCR yielded a band at a molecular weight appropriate for a coronavirus. The virus RNA was tested and it was confirmed to be a new member of the beta group of coronaviruses, closely related to bat coronaviruses. The invention relates to a new previously undescribed Coronavirus isolated from cases of unexplained disease in September 2012 and identified herein as belonging to a newly recognized and previously undescribed species of human Corona Virus (HCoV), herein identified as HCoV-SA1. In particular the nucleic acid and/or amino acid sequences of the HCoV-SA1 genome and sequences encoding (parts of) viral proteins are provided. Further, the invention relates to diagnostic means and methods, prophylactic means and methods and therapeutic means and methods to be employed in the diagnosis, prevention and/or treatment of disease, in particular of respiratory disease and/or renal failure (atypical pneumonia), in particular of mammals, more in particular in humans.

[0050] In particular diagnostic tests for example useful in PCR and serology with nucleic acids (primers) and antibodies and other reagents that are specifically targeted at the nucleic acid or amino acid sequences of the HCoV-SA1 genome are herein provided. The invention also provides vectors, such as bacterial and viral vectors based on nucleic acid or amino acid sequences of the HCoV-SA1 genome. In addition, the invention also provides antigenic polypeptides based amino acid sequences of the HCoV-SA1 genome are herein provided.

[0051] Also, the invention provides vaccines against HCoV-SA1 (based on nucleic acid or amino acid sequences or antigenic polypeptides of the HCoV-SA1 genome, and the invention provides use of antiviral drugs directed against nucleic acid or amino acid sequences or polypeptides of the HCoV-SA1 genome, as herein provided.

[0052] As for yet it is not known if there is a cure for the disease. Several antiviral therapies have been applied, but with various results. Also, for being able to prevent spread of the disease, it is of great importance to be able to recognize the disease in an early stage. Only then sufficient measures can be taken to isolate patients and initiate quarantine precautions. At this moment there is not yet a diagnostic tool in place. Thus, there is great need in developing diagnostic tools and therapies for this disease.

[0053] As further described in the detailed description herein, the isolated essentially mammalian positive-sense single stranded RNA virus classifiable as belonging to the Order: Nidovirales; Family: Coronaviridae; Subfamily: Coronavirinae; Genus: Betacoronavirus; and non-Lineage A, non-Lineage B or non-Lineage D, human betacoronavirus here provided was isolated from a patient with pneumonia. The virus was isolated from sputum of a male patient aged 60 years old presenting with pneumonia associated with acute renal failure. The virus grows readily on Vero cells and LLC-MK2 cells producing CPE in the form of rounding and syncytia formation. It was classified as an isolated essentially mammalian positive-sense single stranded RNA virus classifiable as belonging to the Order: Nidovirales; Family: Coronaviridae; Subfamily: Coronavirinae; Genus: Betacoronavirus; Lineage C human betacoronavirus by comparison of its RNA sequences. It is remarkable that now, at about 9 years after the isolation of the SARS-virus (also related to bat coronavirus) another betacoronavirus has been isolated from humans.

[0054] The invention also provides an isolated essentially mammalian positive-sense single stranded RNA virus comprising one or more of the nucleic acid or comprising one or more of amino acid sequences selected from FIG. 3 depicting the partial open reading frame of HCoV-SA1, FIG. 5 file N.rtf depicting the nucleocapsid (N) protein, FIG. 6 file M.rtf depicting the matrix (M) protein, FIG. 7 file E.rtf depicting the small envelope (E) protein, FIG. 8 file NS3d.rtf depicting the non-structural gene NS3d, FIG. 9 file NS3c.rtf depicting the non-structural gene NS3c, FIG. 10 file NS3b.rtf depicting the non-structural gene NS3b, FIG. 11 file NS3a.rtf depicting the non-structural gene NS3a, FIG. 12 file S.rtf depicting the spike surface glycoprotein (S), FIG. 13 file Orf1ab.rtf encoding many enzymatic products among which the replicase, FIG. 14 file HCoV-SA1.rtf depicting isolate HCoV-SA1 or FIG. 15 HCoV-SA1.rtf depicting its 3 translation frames, or comprising amino acid sequences having at least 75%, more preferably at least 80%, more preferably at least 85%, more preferably at least 90%, most preferably at least 95% identical with a nucleic acid or amino acid sequence depicted in said FIGS. 3, or 5 to 15.

[0055] In particular, the invention provides an isolated positive-sense single stranded RNA virus belonging to the Coronaviruses, genus Betacoronavirus having an amino acid sequence of its conserved replicase domain that is at least 75%, more preferably at least 80%, more preferably at least 85%, more preferably at least 90%, most preferably at least 95% identical with the amino acid sequence of the conserved replicase domain of an isolated essentially mammalian positive-sense single stranded RNA virus classifiable as belonging to the Order: Nidovirales; Family: Coronaviridae; Subfamily: Coronavirinae; Genus: Betacoronavirus; Lineage C isolatable from humans and comprising one or more of the sequences selected from any of FIGS. 3 or 5 to 15, preferably wherein said conserved replicase domain comprises ORF1ab, 90% identity being the species definition of the betacoronaviridae. Virus provided by the invention is herein also called HCoV-SA1 virus-like virus. The invention also provides an isolated positive-sense single stranded RNA virus belonging to the Coronaviruses, genus Betacoronavirus and identifiable as phylogenetically corresponding thereto by determining a nucleic acid or amino acid sequence of said virus and testing it in phylogenetic tree analyses wherein maximum likelihood trees are generated, preferably with 100 bootstraps and 3 jumbles, and finding it to be more closely phylogenetically corresponding to a virus isolate or nucleic acid having the sequences as depicted in any of FIGS. 3 or 5 to 15 than it is corresponding to a bat coronavirus virus HKU4 or HKU5.

[0056] The invention also provides an isolated positive-sense single stranded RNA virus belonging to the Coronaviruses, genus Betacoronavirus and identifiable as phylogenetically corresponding thereto by determining a nucleic acid or amino acid sequence of said virus and testing it in phylogenetic tree analyses wherein maximum likelihood trees are generated, preferably with 100 bootstraps and 3 jumbles, and finding it to be more closely phylogenetically corresponding to a virus isolate or nucleic acid having the sequences as depicted in any of the oligonucleotide or amino acid sequences submitted to GENBANK under accession JX869059 (http://www.ncbi.nlm.nih.gov/nuccore/JX869059) than it is corresponding to any of the oligonucleotide or amino acid sequences of bat coronavirus virus HKU4 or HKU5.

[0057] Although phylogenetic analyses provide a convenient method of identifying a virus as a Betacoronavirus; Lineage C virus several other possibly more straightforward albeit somewhat more coarse methods for identifying said virus or viral proteins or nucleic acids from said virus are herein also provided. As a rule of thumb a Betacoronavirus; Lineage C virus can be identified by the percentages of homology of the virus, proteins or nucleic acids to be identified in comparison with viral proteins or nucleic acids identified herein in or in Genbank accession JX869059 by sequence. It is generally known that virus species, especially RNA virus species, often constitute a quasi species wherein a cluster of said viruses displays heterogeneity among its members. Thus it is expected that each isolate may have a somewhat different percentage relationship with the sequences of the isolate as provided herein.

[0058] The invention in particular provides an isolated positive-sense single stranded RNA virus belonging to the Coronaviruses and identifiable as phylogenetically corresponding thereto by determining a nucleic acid sequence or amino acid sequence of said virus and testing it in phylogenetic tree analyses wherein maximum likelihood trees are generated and finding it to be more closely phylogenetically corresponding to a virus isolate or nucleic acid having the sequences as depicted in any of the oligonucleotide or amino acid sequences submitted to GENBANK under accession JX869059 (http://www.ncbi.nlm.nih.gov/nuccore/JX869059) than it is corresponding to any of the oligonucleotide or amino acid sequences of human coronavirus virus isolate HCoV-HKU1 or HCoV-OC43 or SARS-CoV.

[0059] The invention in particular provides an isolated positive-sense single stranded RNA virus belonging to the Coronaviruses and identifiable as phylogenetically corresponding thereto by determining a nucleic acid sequence or amino acid sequence of said virus and testing it in phylogenetic tree analyses wherein maximum likelihood trees are generated and finding it to be more closely phylogenetically corresponding to a virus isolate isolatable from humans having the sequences as depicted in any of FIGS. 3 or 5 to 15 than it is corresponding to a human coronavirus virus isolate HCoV-HKU1 or HCoV-OC43 or SARS-CoV.

[0060] The invention also provides a virus according to the invention wherein its positive-sense single stranded RNA nucleic acid sequence comprises an open reading frame (ORF) encoding a viral protein of said virus, preferably selected from the group of ORFs encoding the spike surface glycoprotein (S), the non-structural genes NS3a, NS3b, NS3c, NS3d, the small envelope (E) protein, the matrix (M) protein, and the nucleocapsid (N) protein. With the provision of the sequence information of this MERS-CoV, the invention provides diagnostic means and methods, prophylactic means and methods and therapeutic means and methods to be employed in the diagnosis, prevention and/or treatment of disease, in particular of respiratory disease (atypical pneumonia), in particular of mammals, more in particular in humans. In virology, it is most advisory that diagnosis, prophylaxis and/or treatment of a specific viral infection is performed with reagents that are most specific for said specific virus causing said infection. In this case this means that it is preferred that said diagnosis, prophylaxis and/or treatment of a Betacoronavirus; Lineage C virus infection is performed with reagents that are most specific for Betacoronavirus; Lineage C virus. This by no means however excludes the possibilities that less specific, but sufficiently cross-reactive reagents are used instead, for example because they are more easily available and sufficiently address the task at hand. The invention for example provides a method for virologically diagnosing a Betacoronavirus; Lineage C infection of an animal, in particular of a mammal, more in particular of a human being, comprising determining in a sample of said animal the presence of a viral isolate or component thereof by reacting said sample with a Betacoronavirus; Lineage C specific nucleic acid or antibody according to the invention, and a method for serologically diagnosing a Betacoronavirus; Lineage C infection of a mammal comprising determining in a sample of said mammal the presence of an antibody specifically directed against a Betacoronavirus; Lineage C virus or component thereof by reacting said sample with a Betacoronavirus; Lineage C MERS-CoV-specific proteinaceous molecule or fragment thereof or an antigen according to the invention. The invention also provides a diagnostic kit or other system for diagnosing a Betacoronavirus; Lineage C infection comprising a Betacoronavirus; Lineage C virus, a Betacoronavirus; Lineage C MERS-CoV-specific nucleic acid, proteinaceous molecule or fragment thereof, antigen and/or an antibody according to the invention, and preferably a means for detecting said Betacoronavirus; Lineage C virus, Betacoronavirus; Lineage C MERS-CoV-specific nucleic acid, proteinaceous molecule or fragment thereof, antigen and/or an antibody, said means for example comprising an excitable group such as a fluorophore or enzymatic detection system used in the art (examples of suitable diagnostic kit format comprise IF, ELISA, neutralization assay, RT-PCR assay). To determine whether an as yet unidentified virus component or synthetic analogue thereof such as nucleic acid, proteinaceous molecule or fragment thereof can be identified as Betacoronavirus; Lineage C-MERS-CoV-specific, it suffices to analyze the nucleic acid or amino acid sequence of said component, for example for a stretch of said nucleic acid or amino acid, preferably of at least 10, more preferably at least 25, more preferably at least 40 nucleotides or amino acids (respectively), by sequence homology comparison with the provided Betacoronavirus; Lineage C viral sequences and with known non-Betacoronavirus; Lineage C viral sequences (SARS is preferably used) using for example phylogenetic analyses as provided herein. Depending on the degree of relationship with said Betacoronavirus; Lineage C or non-Betacoronavirus; Lineage C viral sequences, (herein also called HCoV-SA1 virus-like virus sequences) the component or synthetic analogue can be identified. The invention also provides a virus according to the invention that is isolatable from a human with atypical pneumonia. Also, isolated or recombinant nucleic acid or MERS-CoV-specific fragments thereof are obtainable, derived or obtained from a virus according to the invention, as are a vector comprising a nucleic acid according to the invention, and a host cell comprising a nucleic acid or vector according to the invention.

[0061] The invention also provides an isolated or recombinant proteinaceous molecule or MERS-CoV-specific fragment thereof encoded by a nucleic acid according to the invention. In a preferred embodiment, the invention provides a proteinaceous molecule or MERS-CoV-specific viral protein or fragment thereof encoded by a nucleic acid according to the invention. Useful proteinaceous molecules are for example derived from any of the genes or genomic fragments derivable from a virus according to the invention. Such molecules, or antigenic fragments thereof, as provided herein, are for example useful in diagnostic methods or kits and in pharmaceutical compositions such as sub-unit vaccines and inhibitory peptides. Particularly useful is the viral polymerase protein, the spike protein, the nucleocapsid or antigenic fragments thereof for inclusion as antigen or subunit immunogen, but inactivated whole virus can also be used. Particularly useful are also those proteinaceous substances that are encoded by recombinant nucleic acid fragments that are identified for phylogenetic analyses, of course preferred are those that are within the preferred bounds and metes of ORFs useful in phylogenetic analyses, in particular for eliciting HCoV-SA1 virus-like virus specific antibodies, whether in vivo (e.g. for protective purposes or for providing diagnostic antibodies) or in vitro (e.g. by phage display technology or another technique useful for generating synthetic antibodies). Similarly, the invention provides an antigen comprising a proteinaceous molecule or MERS-CoV-specific fragment thereof according to the invention, or reactive with an antibody according to the invention.

[0062] Also provided herein are antibodies, be it natural polyclonal or monoclonal, or synthetic (e.g. (phage) library-derived binding molecules) antibodies that specifically react with an antigen comprising a proteinaceous molecule or HCoV-virus-like MERS-CoV-specific fragment thereof according to the invention. A person skilled in the art will be able to develop (monoclonal) antibodies using isolated virus material and/or recombinantly expressed viral proteins. Sui et al. (Proc. Natl. Acad. Sci. 101(8), 2536-2541, 2004) have transiently expressed fragments of the spike protein and found several antibodies through phage display methods. Such antibodies are also useful in a method for identifying a viral isolate as a HCoV-SA1 virus-like virus comprising reacting said viral isolate or a component thereof with an antibody as provided herein. This can for example be achieved by using purified or non-purified HCoV-SA1 virus-like virus or parts thereof (proteins, peptides) using ELISA, RIA, FACS or similar formats of antigen detection assays (Current Protocols in Immunology). Alternatively, infected cells or cell cultures may be used to identify viral antigens using classical immunofluorescence or immunohistochemical techniques. Specifically useful in this respect are antibodies raised against HCoV-SA1 virus-like virus proteins which are encoded by a nucleotide sequence comprising one or more of the fragments disclosed herein.

[0063] The invention also provides method for identifying a viral isolate as a Betacoronavirus, Lineage C comprising reacting said viral isolate or a component thereof with a nucleic acid according to the invention. Other methods for identifying a viral isolate as a HCOV-SA1 virus or MERS-CoV comprise reacting said viral isolate or a component thereof with a virus specific nucleic acid according to the invention

[0064] In this way the invention provides a viral isolate identifiable with a method according to the invention as a mammalian virus taxonomically corresponding to a positive-sense single stranded RNA virus identifiable as likely belonging to the HCOV-SA1 or MERS-CoV virus genus within the family of Coronaviruses.

[0065] The method is useful in a method for virologically diagnosing a HCOV-SA1 or MERS-CoV virus infection of a mammal, said method for example comprising determining in a sample of said mammal the presence of a viral isolate or component thereof by reacting said sample with a nucleic acid or an antibody according to the invention.

[0066] Methods of the invention can in principle be performed by using any nucleic acid amplification method, such as the. Polymerase Chain Reaction (PCR; Mullis 1987, U.S. Pat. Nos. 4,683,195, 4,683,202, en 4,800,159) or by using amplification reactions such as Ligase Chain Reaction (LCR; Barany 1991, Proc. Natl. Acad. Sci. USA 88:189-193; EP Appl. No., 320,308), Self-Sustained Sequence Replication (3SR; Guatelli et al., 1990, Proc. Natl. Acad. Sci. USA 87:1874-1878), Strand Displacement Amplification (SDA; U.S. Pat. No. 5,270,184, en U.S. Pat. No. 5,455,166), Transcriptional Amplification System (TAS; Kwoh et al., Proc. Natl. Acad. Sci. USA 86:1173-1177), Q-Beta Replicase (Lizardi et al., 1988, Bio/Technology 6:1197), Rolling Circle Amplification (RCA; U.S. Pat. No. 5,871,921), Nucleic Acid Sequence Based Amplification (NASBA), Cleavage Fragment Length Polymorphism (U.S. Pat. No. 5,719,028), Isothermal and Chimeric Primer-initiated Amplification of Nucleic Acid (ICAN), Ramification-extension Amplification Method (RAM; U.S. Pat. Nos. 5,719,028 and 5,942,391) or other suitable methods for amplification of nucleic acids.

[0067] In order to amplify a nucleic acid with a small number of mismatches to one or more of the amplification primers, an amplification reaction may be performed under conditions of reduced stringency (e.g. a PCR amplification using an annealing temperature of 38.degree. C., or the presence of 3.5 mM MgCl2). The person skilled in the art will be able to select conditions of suitable stringency.

[0068] The primers herein are selected to be “substantially” complementary (i.e. at least 65%, more preferably at least 80% perfectly complementary) to their target regions present on the different strands of each specific sequence to be amplified. It is possible to use primer sequences containing e.g. inositol residues or ambiguous bases or even primers that contain one or more mismatches when compared to the target sequence. In general, sequences that exhibit at least 65%, more preferably at least 80% homology with the target DNA or RNA oligonucleotide sequences are considered suitable for use in a method of the present invention. Sequence mismatches are also not critical when using low stringency hybridization conditions.

[0069] The detection of the amplification products can in principle be accomplished by any suitable method known in the art. The detection fragments may be directly stained or labeled with radioactive labels, antibodies, luminescent dyes, fluorescent dyes, or enzyme reagents. Direct DNA stains include for example intercalating dyes such as acridine orange, ethidium bromide, ethidium monoazide or Hoechst dyes.

[0070] Alternatively, the DNA or RNA fragments may be detected by incorporation of labeled dNTP bases into the synthesized fragments. Detection labels which may be associated with nucleotide bases include e.g. fluorescein, cyanine dye or BrdUrd. When using a probe-based detection system, a suitable detection procedure for use in the present invention may for example comprise an enzyme immunoassay (EIA) format (Jacobs et al., 1997, J. Clin. Microbiol. 35, 791-795). For performing a detection by manner of the EIA procedure, either the forward or the reverse primer used in the amplification reaction may comprise a capturing group, such as a biotin group for immobilization of target DNA PCR amplicons on e.g. a streptavidin coated microtiter plate wells for subsequent EIA detection of target DNA-amplicons (see below). The skilled person will understand that other groups for immobilization of target DNA PCR amplicons in an EIA format may be employed.

[0071] Probes useful for the detection of the target DNA as disclosed herein preferably bind only to at least a part of the DNA sequence region as amplified by the DNA amplification procedure. Those of skill in the art can prepare suitable probes for detection based on the nucleotide sequence of the target DNA without undue experimentation as set out herein. Also the complementary nucleotide sequences, whether DNA or RNA or chemically synthesized analogs, of the target DNA may suitably be used as type-specific detection probes in a method of the invention, provided that such a complementary strand is amplified in the amplification reaction employed.

[0072] Suitable detection procedures for use herein may for example comprise immobilization of the amplicons and probing the DNA sequences thereof by e.g. southern blotting. Other formats may comprise an EIA format as described above. To facilitate the detection of binding, the specific amplicon detection probes may comprise a label moiety such as a fluorophore, a chromophore, an enzyme or a radio-label, so as to facilitate monitoring of binding of the probes to the reaction product of the amplification reaction. Such labels are well-known to those skilled in the art and include, for example, fluorescein isothiocyanate (FITC), beta-galactosidase, horseradish peroxidase, streptavidin, biotin, digoxigenin, 35S or 125I. Other examples will be apparent to those skilled in the art.

[0073] Detection may also be performed by a so called reverse line blot (RLB) assay, such as for instance described by Van den Brule et al. (2002, J. Clin. Microbiol. 40, 779-787). For this purpose RLB probes are preferably synthesized with a 5′ amino group for subsequent immobilization on e.g. carboxyl-coated nylon membranes. The advantage of an RLB format is the ease of the system and its speed, thus allowing for high throughput sample processing.

[0074] The use of nucleic acid probes for the detection of RNA or DNA fragments is well known in the art. Mostly these procedures comprise the hybridization of the target nucleic acid with the probe followed by post-hybridization washings. Specificity is typically the function of post-hybridization washes, the critical factors being the ionic strength and temperature of the final wash solution. For nucleic acid hybrids, the Tm can be approximated from the equation of Meinkoth and Wahl, Anal. Biochem., 138: 267-284 (1984): Tm=81.5.degree. C.+16.6 (log M)+0.41 (% GC)-0.61 (% form)-500/L; where M is the molarity of monovalent cations, % GC is the percentage of guanosine and cytosine nucleotides in the nucleic acid, % form is the percentage of formamide in the hybridization solution, and L is the length of the hybrid in base pairs. The Tm is the temperature (under defined ionic strength and pH) at which 50% of a complementary target sequence hybridizes to a perfectly matched probe. Tm is reduced by about 1.degree. C. for each 1% of mismatching; thus, the hybridization and/or wash conditions can be adjusted to hybridize to sequences of the desired identity. For example, if sequences with >90% identity are sought, the Tm can be decreased 10.degree. C. Generally, stringent conditions are selected to be about 5.degree. C. lower than the thermal melting point (Tm) for the specific sequence and its complement at a defined ionic strength and pH. However, severely stringent conditions can utilize hybridization and/or wash at 1, 2, 3, or 4.degree. C. lower than the thermal melting point (Tm); moderately stringent conditions can utilize a hybridization and/or wash at 6, 7, 8, 9, or 10.degree. C. lower than the thermal melting point (Tm); low stringency conditions can utilize a hybridization and/or wash at 11, 12, 13, 14, 15, or 20.degree. C. lower than the thermal melting point (Tm). Using the equation, hybridization and wash compositions, and desired Tm, those of ordinary skill will understand that variations in the stringency of hybridization and/or wash solutions are inherently described. If the desired degree of mismatching results in a Tm of less than 45.degree. C. (aqueous solution) or 32.degree. C. (formamide solution) it is preferred to increase the SSC concentration so that a higher temperature can be used. An extensive guide to the hybridization of nucleic acids is found in Tijssen, Laboratory Techniques in Biochemistm and Molecular Biology—Hybridization with Nucleic Acid Probes, Part I, Chapter 2 “Overview of principles of hybridization and the strategy of nucleic acid probe assays”, Elsevier. New York (1993); and Current Protocols in Molecular Biology, Chapter 2, Ausubel, et al., Eds., Greene Publishing and Wiley-Interscience, New York (1995).

[0075] In another aspect, the invention provides oligonucleotide probes for the generic detection of target RNA or DNA. The detection probes herein are selected to be “substantially” complementary to one of the strands of the double stranded nucleic acids generated by an amplification reaction of the invention. Preferably the probes are substantially complementary to the immobilizable, e.g. biotin labelled, antisense strands of the amplicons generated from the target RNA or DNA.

[0076] It is allowable for detection probes of the present invention to contain one or more mismatches to their target sequence. In general, sequences that exhibit at least 65%, more preferably at least 80% homology with the target oligonucleotide sequences are considered suitable for use in a method of the present invention. Antibodies, both monoclonal and polyclonal, can also be used for detection purpose in the present invention, for example, in immunoassays in which they can be utilized in liquid phase or bound to a solid phase carrier. In addition, the monoclonal antibodies in these immunoassays can be detectably labeled in various ways. A variety of immunoassay formats may be used to select antibodies specifically reactive with a particular protein (or other analyte). For example, solid-phase ELISA immunoassays are routinely used to select monoclonal antibodies specifically immunoreactive with a protein. See Harlow and Lane, Antibodies, A Laboratory Manual, Cold Spring Harbor Publications, New York (1988), for a description of immunoassay formats and conditions that can be used to determine selective binding. Examples of types of immunoassays that can utilize antibodies of the invention are competitive and non-competitive immunoassays in either a direct or indirect format. Examples of such immunoassays are the radioimmunoassay (RIA) and the sandwich (immunometric) assay. Detection of the antigens using the antibodies of the invention can be done utilizing immunoassays that are run in either the forward, reverse, or simultaneous modes, including immunohistochemical assays on physiological samples. Those of skill in the art will know, or can readily discern, other immunoassay formats Antibodies can be bound to many different carriers and used to detect the presence of the target molecules. Examples of well-known carriers include glass, polystyrene, polypropylene, polyethylene, dextran, nylon, amylases, natural and modified celluloses, polyacrylamides, agaroses and magnetite. The nature of the carrier can be either soluble or insoluble for purposes of the invention. Those skilled in the art will know of other suitable carriers for binding monoclonal antibodies, or will be able to ascertain such using routine experimentation.

[0077] The invention also provides a method for serologically diagnosing a MERS-CoV infection of a mammal comprising determining in a sample of said mammal the presence of an antibody specifically directed against a MERS-CoV or component thereof by reacting said sample with a proteinaceous molecule or fragment thereof or an antigen according to the invention

[0078] Methods and means provided herein are particularly useful in a diagnostic kit for diagnosing a MERS-CoV infection, be it by virological or serological diagnosis. Such kits or assays may for example comprise a virus, a nucleic acid, a proteinaceous molecule or fragment thereof, an antigen and/or an antibody according to the invention.

[0079] Herewith, the invention provides a method for virologically diagnosing a Betacoronavirus, Lineage C infection of a mammal comprising determining in a sample of said mammal the presence of a viral isolate or component thereof by reacting said sample with a nucleic acid according to the invention or an antibody according to the invention or determining in a sample of said mammal the presence of an antibody specifically directed against a Betacoronavirus, Lineage C virus or component thereof by reacting said sample with a proteinaceous molecule or fragment thereof according to the invention or an antigen according to the invention.

[0080] The invention also provides diagnostic kit for diagnosing a Betacoronavirus, Lineage C infection comprising a virus according to the invention, a nucleic acid according to the invention, a proteinaceous molecule or fragment thereof according to the invention, an antigen according to the invention and/or an antibody according to the invention.

[0081] The invention also provides use of a MERS-CoV according to the invention, a nucleic acid according to the invention, a vector according to the invention, a host cell according to the invention, a proteinaceous molecule or fragment thereof according to the invention, an antigen according to the invention, or an antibody according to the invention for the production of a pharmaceutical composition, preferably for the production of a pharmaceutical composition for the treatment or prevention of a Betacoronavirus, Lineage C virus infection, preferably a human infection, or for the production of a pharmaceutical composition for the treatment or prevention of atypical pneumonia and/or renal failure, preferably wherein said atypical pneumonia and/or renal failure is a human disease.

[0082] The invention also provides pharmaceutical composition comprising a virus according to the invention, a nucleic acid according to the invention, a vector according to the invention, a host cell according to the invention, a proteinaceous molecule or fragment thereof according to the invention, an antigen according to the invention, or an antibody according to the invention.

[0083] A pharmaceutical composition comprising a virus, a nucleic acid, a proteinaceous molecule or fragment thereof, an antigen and/or an antibody according to the invention can for example be used in a method for the treatment or prevention of a MERS-CoV infection and/or a respiratory illness comprising providing an individual with a pharmaceutical composition according to the invention. This is most useful when said individual comprises a human. Antibodies against MERS-CoV proteins, especially against the spike protein of MERS-CoV, preferably against the amino acid sequence as depicted herein are also useful for prophylactic or therapeutic purposes, as passive vaccines. It is known from other coronaviruses that the spike protein is a very strong antigen and that antibodies against spike protein can be used in prophylactic and therapeutic vaccination.

[0084] The invention also provides method to obtain a modulator or an antiviral agent useful in the treatment of atypical pneumonia comprising establishing a cell culture or experimental animal comprising a virus according to the invention, treating said culture or animal with a candidate antiviral agent, and determining the effect of said modulator or agent on said virus or its infection of said culture or animal. An example of such an antiviral agent comprises a MERS-CoV virus-neutralizing antibody, or functional component thereof, as provided herein, but antiviral agents of other nature, such as ADA or adenosine are obtained as well. The invention also provides use of a modulator or an antiviral agent according to the invention for the preparation of a pharmaceutical composition, in particular for the preparation of a pharmaceutical composition for the treatment of atypical pneumonia, specifically when caused by a MERS-CoV infection, and provides a pharmaceutical composition comprising an antiviral agent according to the invention, useful in a method for the treatment or prevention of a MERS-CoV infection or atypical pneumonia, said method comprising providing an individual with such a pharmaceutical composition.

[0085] The invention also provides a method for the treatment or prevention of a Betacoronavirus, Lineage C virus infection or for the treatment or prevention of atypical pneumonia comprising providing an individual, preferably a human individual with a pharmaceutical composition according to the invention. In particular individual MERS-CoV virus-like polypeptide are provided herein as well, such as the viral replicase encoded by an RNA or DNA or cDNA sequence or fragments or homologues thereof, as depicted in FIG. 13. A viral spike protein encoded by an RNA or DNA or cDNA sequence or fragments or homologues thereof, as depicted in FIG. 12, a viral non-structural gene protein encoded by an RNA or DNA or cDNA sequence or fragments or homologues thereof, as depicted in any of FIG. 8, 9, 10 or 11, a small envelope (E) protein encoded by an RNA or DNA or cDNA sequence or fragments or homologues thereof, as depicted in FIG. 7, a matrix (M) protein encoded by an RNA or DNA or cDNA sequence or fragments or homologues thereof, as depicted in FIG. 6, a nucleocapsid (N) protein encoded by an RNA or DNA or cDNA sequence or fragments or homologues thereof, as depicted in FIG. 5, a nucleic acid sequence which comprises one or more of the sequences of HCoV-SA1 as depicted in FIGS. 3, or 5 to 15 or a nucleic acid sequence which can hybridize with any of these sequences under stringent conditions.

[0086] With the provision of the sequence information of this MERS virus, MERS-CoV, the invention provides diagnostic means and methods, prophylactic means and methods and therapeutic means and methods to be employed in the diagnosis, prevention and/or treatment of disease, in particular of respiratory disease (atypical pneumonia), in particular of mammals, more in particular in humans. In virology, it is most advisory that diagnosis, prophylaxis and/or treatment of a specific viral infection is performed with reagents that are most specific for said specific virus causing said infection. In this case this means that it is preferred that said diagnosis, prophylaxis and/or treatment of a MERS virus infection is performed with reagents that are most specific for MERS virus. This by no means however excludes the possibilities that less specific, but sufficiently cross-reactive reagents are used instead, for example because they are more easily available and sufficiently address the task at hand.

[0087] The invention for example provides a method for virologically diagnosing a MERS infection of an animal, in particular of a mammal, more in particular of a human being, comprising determining in a sample of said animal the presence of a viral isolate or component thereof by reacting said sample with a MERS specific nucleic acid or antibody according to the invention, and a method for serologically diagnosing a MERS infection of a mammal comprising determining in a sample of said mammal the presence of an antibody specifically directed against a MERS virus or component thereof by reacting said sample with a MERS-CoV-specific proteinaceous molecule or fragment thereof or an antigen according to the invention. Suitable MERS-CoV specific nucleic acid can for example is provided herein as well, such as the RNA or DNA or cDNA sequence or fragments or homologues thereof, as depicted in FIG. 13, or as depicted in FIG. 12, or in any of FIG. 8, 9, 10 or 11, in FIG. 7, in FIG. 6, in FIG. 5, a nucleic acid sequence which comprises one or more of the sequences of HCoV-SA1 or a MERS-CoV specific nucleic acid sequence which can hybridize with sequences in any of figures as depicted in FIGS. 3, or 5 to 15 under stringent conditions, or a MERS-CoV specific nucleic acid sequence, such as an RNA or a DNA or preferably a cDNA, which has at least 65%, preferably at least 75%, more preferably at least 85%, most preferably at least 95% homology or are substantially, at least 65%, preferably at least 75%, more preferably at least 85%, most preferably at least 95%, complementary with a nucleotide sequence as depicted in FIGS. 3, or 5 to 15. For MERS CoV nucleic acid diagnosis, short nucleotide stretches of 10 to 40, preferably 12 to 30, more preferably 15 to 25 nucleotides long, commonly called “primers” are provided herein that preferably are MERS-CoV specific or at least substantially complementary to MERS virus nucleic acid as depicted in FIG. 3, or 5-15 and have stretches of at least 10, preferably at least 12, more preferably at least 15, most preferably at least 18 or 19 nucleotides that are 100% complementary to at least a fragment of a nucleotide sequence as depicted in FIGS. 3, or 5 to 15. The term “nucleotide sequence homology” as used herein denotes the presence of homology between two (poly) nucleotides, such as a RNA or a DNA or a cDNA sequence. Polynucleotides have “homologous” sequences if the sequence of nucleotides in the two sequences is the same when aligned for maximum correspondence. Sequence comparison between two or more polynucleotides is generally performed by comparing portions of the two sequences over a comparison window to identify and compare local regions of sequence similarity. The comparison window is generally from about 20 to 200 contiguous nucleotides. The “percentage of sequence homology” for polynucleotides, such as 50, 60, 70, 80, 90, 95, 98, 99 or 100 percent sequence homology may be determined by comparing two optimally aligned sequences over a comparison window, wherein the portion of the polynucleotide sequence in the comparison window may include additions or deletions (i.e. gaps) as compared to the reference sequence (which does not comprise additions or deletions) for optimal alignment of the two sequences. Nucleotide or base G is homologous to G, C is homologous to C, A is homologous to A and nucleotides T or U are homologous to T or U, to calculate overall homology or complementarities between DNA and RNA. The percentage is calculated by: (a) determining the number of positions at which the identical nucleic acid base occurs in both sequences to yield the number of matched positions; (b) dividing the number of matched positions by the total number of positions in the window of comparison; and (c) multiplying the result by 100 to yield the percentage of sequence homology. Optimal alignment of sequences for comparison may be conducted by computerized implementations of known algorithms, or by inspection. Readily available sequence comparison and multiple sequence alignment algorithms are, respectively, the Basic Local Alignment Search Tool (BLAST) (Altschul, S. F. et al. 1990. J. Mol. Biol. 215:403; Altschul, S. F. et al. 1997. Nucleic Acid Res. 25:3389-3402) and ClustalW programs both available on the internet. Other suitable programs include GAP, BESTFIT and FASTA in the Wisconsin Genetics Software Package (Genetics Computer Group (GCG), Madison, Wis., USA).

[0088] As used herein, “substantially complementary” means that two nucleic acid sequences have at least about 65%, preferably about 70%, more preferably about 80%, even more preferably 90%, and most preferably about 98%, sequence complementarities to each other. This means that the primers and probes must exhibit sufficient complementarity to their template and target nucleic acid, respectively, to hybridize under stringent conditions. Therefore, the primer sequences as disclosed in this specification need not reflect the exact sequence of the binding region on the template and degenerate primers can be used. A substantially complementary primer sequence is one that has sufficient sequence complementarity to the amplification template to result in primer binding and second-strand synthesis.

[0089] The term “hybrid” refers to a double-stranded nucleic acid molecule, or duplex, formed by hydrogen bonding between complementary nucleotides. The terms “hybridize” or “anneal” refer to the process by which single strands of nucleic acid sequences form double-helical segments through hydrogen bonding between complementary nucleotides, according to a strict rule called base-pairing defined by the complementary structures of the nucleotides or bases (b). Typically, in two nucleic acid strands, nucleotide guanine (G) is complementary to nucleotide cytosine (C), G and C pair wise capable of forming three hydrogen bonds, and nucleotide adenine (A) is complementary to nucleotides thymine (T) or uracil (U), A and T or A and U pair wise capable of forming two hydrogen bonds, thus G pairs with C and A pairs with T or U. Conventionally, in depicting a nucleic acid sequence, T is commonly identified as uracil (U) to identify RNA (ribonucleic acid), and as thymine (T) when identifying DNA (deoxyribonucleic acid) or cDNA (complementary or copy DNA). A DNA polymerase is a cellular or viral polymerase enzyme that synthesizes DNA molecules from their nucleotide building blocks. DNA polymerases are essential for DNA replication, and usually function in pairs while copying one double-stranded DNA molecule into two double-stranded DNAs in a process termed DNA replication. RNA viruses commonly use an RNA-dependent RNA-polymerase to replicate their RNA. DNA can be used to produce RNA by the actions of a transcriptase; RNA can be used to produce DNA or cDNA by the actions of a reverse transcriptase. A transcriptase is a polymerase that catalyzes the formation of RNA from a DNA template in the process of transcription. Reverse transcriptase (RT) is a polymerase enzyme used to generate complementary DNA (cDNA) from an RNA template, a process termed reverse transcription.

[0090] The term “oligonucleotide” refers to a short sequence of nucleotide monomers (usually 6 to 100 nucleotides) joined by phosphorous linkages (e.g., phosphodiester, alkyl and aryl-phosphate, phosphorothioate), or non-phosphorous linkages (e.g., peptide, sulfamate and others). An oligonucleotide may contain modified nucleotides having modified bases (e.g., 5-methyl cytosine) and modified sugar groups (e.g., 2′-O-methyl ribosyl 2′-O-methoxyethyl ribosyl, 2′-fluoro ribosyl, 2′-amino ribosyl, and the like). Oligonucleotides may be naturally-occurring or synthetic molecules of double- and single-stranded DNA and double- and single-stranded RNA with circular, branched or linear shapes and optionally including domains capable of forming stable secondary structures (e.g., stem-and-loop and loop-stem-loop structures).

[0091] The term “primer” as used herein also refers to an oligonucleotide which is capable of annealing to the amplification target allowing a DNA polymerase to attach thereby serving as a point of initiation of DNA synthesis when placed under conditions in which synthesis of primer extension product which is complementary to a nucleic acid strand is induced, i.e., in the presence of nucleotides and an agent for polymerization such as DNA polymerase and at a suitable temperature and pH. The (amplification) primer is preferably single stranded for maximum efficiency in amplification. Preferably, the primer is an oligodeoxyribonucleotide. The primer must be sufficiently long to prime the synthesis of extension products in the presence of the agent for polymerization. The exact lengths of the primers will depend on many factors, including temperature and source of primer. A “pair of bi-directional primers” as used herein refers to one forward and one reverse primer as commonly used in the art of RNA or DNA amplification such as in PCR amplification.

[0092] The term “probe” refers to a single-stranded oligonucleotide sequence that will recognize and form a hydrogen-bonded duplex with a complementary sequence in a target nucleic acid sequence analyte or its cDNA derivative.

[0093] The terms “stringency” or “stringent hybridization conditions” refer to hybridization conditions that affect the stability of hybrids, e.g., temperature, salt concentration, pH, formamide concentration and the like. These conditions are empirically optimized to maximize specific binding and minimize non-specific binding of primer or probe to its target nucleic acid sequence. The terms as used include reference to conditions under which a probe or primer will hybridize to its target sequence, to a detectably greater degree than other sequences (e.g. at least 2-fold over background). Stringent conditions are sequence dependent and will be different in different circumstances. Longer sequences hybridize specifically at higher temperatures. Generally, stringent conditions are selected to be about 5. degree. C. lower than the thermal melting point (Tm) for the specific sequence at a defined ionic strength and pH. The Tm is the temperature (under defined ionic strength and pH) at which 50% of a complementary target sequence hybridizes to a perfectly matched probe or primer. Typically, stringent conditions will be those in which the salt concentration is less than about 1.0 M Na+ ion, typically about 0.01 to 1.0 M Na+ ion concentration (or other salts) at pH 7.0 to 8.3 and the temperature is at least about 30.degree. C. for short probes or primers (e.g. 10 to 50 nucleotides) and at least about 60.degree. C. for long probes or primers (e.g. greater than 50 nucleotides). Stringent conditions may also be achieved with the addition of destabilizing agents such as formamide. Exemplary low stringent conditions or “conditions of reduced stringency” include hybridization with a buffer solution of 30% formamide, 1 M NaCl, 1% SDS at 37.degree. C. and a wash in 2.times.SSC at 40.degree. C. Exemplary high stringency conditions include hybridization in 50% formamide, 1 M NaCl, 1% SDS at 37.degree. C., and a wash in 0.1.times.SSC at 60.degree. C. Hybridization procedures are well known in the art and are described in e.g. Ausubel et al, Current Protocols in Molecular Biology, John Wiley & Sons Inc., 1994.

[0094] The invention for example provides a method for virologically diagnosing a MERS infection of an animal, in particular of a mammal, more in particular of a human being, comprising determining in a sample of said animal the presence of a viral isolate or component thereof by reacting said sample with a MERS specific nucleic acid or antibody according to the invention, and a method for serologically diagnosing a MERS infection of a mammal comprising determining in a sample of said mammal the presence of an antibody specifically directed against a MERS virus or component thereof by reacting said sample with a MERS MERS-CoV-specific proteinaceous molecule or fragment thereof or an antigen according to the invention. Suitable MERS specific proteinaceous molecules or MERS virus specific fragment thereof is provided herein as well, such as the viral replicase encoded by an RNA or DNA or cDNA sequence or fragments or homologues thereof, as depicted in FIG. 13, a viral spike protein encoded by an RNA or DNA or cDNA sequence or fragments or homologues thereof, as depicted in FIG. 12, a viral non-structural gene protein encoded by an RNA or DNA or cDNA sequence or fragments or homologues thereof, as depicted in any of FIG. 8, 9, 10 or 11, a small envelope (E) protein encoded by an RNA or DNA or cDNA sequence or fragments or homologues thereof, as depicted in FIG. 7, a matrix (M) protein encoded by an RNA pr DNA sequence or fragments or homologues thereof, as depicted in FIG. 6, a nucleocapsid (N) protein encoded by an RNA or DNA or cDNA sequence or fragments or homologues thereof, as depicted in FIG. 5, a nucleic acid sequence which comprises one or more of the sequences of HCoV-SA1 as depicted in FIGS. 3, or 5 to 15 or a nucleic acid sequence which can hybridize with any of these sequences under stringent conditions.

[0095] Suitable MERS CoV specific antibodies directed against MERS CoV specific proteinaceous molecules or MERS CoV specific fragment thereof is provided herein as well, such as antibodies raised against a viral replicase encoded by an RNA sequence or fragments or homologues thereof, as depicted in FIG. 13, raised against a viral spike protein encoded by an RNA or DNA or cDNA sequence or fragments or homologues thereof, as depicted in FIG. 12, raised against a viral non-structural gene protein encoded by an RNA or DNA or cDNA sequence or fragments or homologues thereof, as depicted in any of FIG. 8, 9, 10 or 11, raised against a small envelope (E) protein encoded by an RNA or DNA or cDNA sequence or fragments or homologues thereof, as depicted in FIG. 7, raised against a matrix (M) protein encoded by an RNA or DNA or cDNA sequence or fragments or homologues thereof, as depicted in FIG. 6, raised against a nucleocapsid (N) protein encoded by an RNA or DNA or cDNA sequence or fragments or homologues thereof, as depicted in FIG. 5, a nucleic acid sequence which comprises one or more of the sequences of HCoV-SA1 as depicted in FIGS. 3, or 5 to 15 or a nucleic acid sequence which can hybridize with any of these sequences under stringent conditions.

[0096] The term “antibody” includes reference to antigen binding forms of antibodies (e. g., Fab, F(ab)2). The term “antibody” frequently refers to a polypeptide substantially encoded by an immunoglobulin gene or immunoglobulin genes, or fragments thereof which specifically bind and recognize an analyte (antigen). However, while various antibody fragments can be defined in terms of the digestion of an intact antibody, one of skill will appreciate that such fragments may be synthesized de novo either chemically or by utilizing recombinant DNA methodology. Thus, the term antibody, as used herein, also includes antibody fragments such as single chain Fv, chimeric antibodies (i. e., comprising constant and variable regions from different species), humanized antibodies (i. e., comprising a complementarity determining region (CDR) from a non-human source) and heteroconjugate antibodies (e. g., bispecific antibodies).

[0097] The invention also provides a diagnostic kit for diagnosing a MERS-CoV infection comprising a MERS Corona virus, or a MERS-CoV-specific nucleic acid, or a MERS-CoV-specific proteinaceous molecule or fragment thereof, a MERS-CoV-specific antigen and/or an a MERS-CoV-specific antibody according to the invention, and preferably a means for detecting said MERS-CoV, MERS-CoV-specific nucleic acid, said proteinaceous molecule or fragment thereof, said antigen and/or said antibody, said means for example comprising an excitable group such as a fluorophore or enzymatic detection system used in the art (examples of suitable diagnostic kit format comprise IF, ELISA, neutralization assay, RT-PCR assay). To determine whether an as yet unidentified virus component or synthetic analogue thereof such as nucleic acid, proteinaceous molecule or fragment thereof can be identified as MERS-CoV-specific, it suffices to analyze the nucleic acid or amino acid sequence of said component, for example for a stretch of said nucleic acid or amino acid, preferably of at least 10, more preferably at least 25, more preferably at least 40 nucleotides or amino acids (respectively), by sequence homology comparison with the herein provided MERS viral sequences and with known non-MERS viral sequences (HUK4 or HUK5 are preferably used) using for example phylogenetic analyses as provided herein. Depending on the degree of relationship with said MERS or non-MERS viral sequences, the component or synthetic analogue can be identified.
[0098] The sequence of the first isolate of MERS-CoV is also deposited in Genbank under:
[0099] LOCUS JX869059 30119 bp RNA linear VRL 4 Dec. 2012
[0100] DEFINITION Human betacoronavirus 2c EMC/2012, complete genome.
[0101] ACCESSION JX869059
[0102] VERSION JX869059.2 GI:409052551
[0103] KEYWORDS
[0104] SOURCE Human betacoronavirus 2c EMC/2012
   [0105] ORGANISM Human betacoronavirus 2c EMC/2012
      [0106] Viruses; ssRNA positive-strand viruses, no DNA stage; Nidovirales; Coronaviridae; Coronavirinae; Betacoronavirus; unclassified Betacoronavirus.
[0107] REFERENCE 1 (bases 1 to 30119)
   [0108] AUTHORS van Boheemen, S., de Graaf, M., Lauber, C., Bestebroer, T. M., Raj, V. S., Zaki, A. M., Osterhaus, A. D., Haagmans, B. L., Gorbalenya, A. E., Snijder, E. J. and Fouchier, R. A.
   [0109] TITLE Genomic characterization of a newly discovered coronavirus associated with acute respiratory distress syndrome in humans
   [0110] JOURNAL MBio 3 (6), e00473-12 (2012)
      [0111] PUBMED 23170002

[0112] The present invention in particular also relates to the spike (S) protein of a Coronavirus that utilizes DPP4 as a virus receptor and fragments thereof as for example depicted in FIGS. 16, 17 and 32.

[0113] The invention in a further embodiment also provides a proteinaceous substance comprising, preferably having been provided, with at least a fragment of a viral protein, preferably an isolated fragment, herein a fragment obtained by recombinant means is preferably used as the probe protein, but a synthetic peptide obtained by chemical peptide synthesis can also be used, also called a first fragment and having also been provided with at least a fragment of an N terminal dipeptidyl peptidase, herein surprisingly found to be the target protein specifically reacting with the used viral probe and herein also called a second fragment.

[0114] In describing a proteinaceous substance herein, reference is made to protein containing material, such as an organism or a part thereof, microbial organism, virus, tissue, cell, cell culture, cell culture precipitate, cell culture supernatant, cell content such as cytoplasm, nucleoplasm, nuclei, nucleoli, cell organelles, mitochondria, ribosome, tubuli, plasma, blood, serum, lymph, drainage fluid, and to a protein containing preparation, such as a buffer, dilution, precipitate, extraction, pull down sample, test sample, spray, chromatographic sample, or a crystal.

[0115] Surprisingly, in pull down binding experiments with a fragment of a newly discovered coronavirus, it was found that the first isolated fragment, comprising an ectodomain of the spike protein of the virus, bound to at least the ectodomain of a prolyl peptidase, an N terminal dipeptidyl peptidase, the identity of which was confirmed by mass spectrometric analyses of tryptic peptide digests. No binding interaction between an N terminal dipeptidyl peptidase and a viral protein has been found before, in particular, not wherein the peptidase is acting as a receptor for the virus, allowing viral entry and replication in a cell. Blocking DPP4 with specific anti DPP4 antibodies indeed abolished viral infection.

[0116] The invention also relates to ten protease families that are unique to higher organisms (16 protease families can be identified in the genomes of all forms of cellular life). Within this core group of ten protease families, a multitude of proteases evolved to yield intra and extra cellular processes. Dipeptidyl peptidase 4 (DPP4; Dipeptidyl Peptidase IV (DPPIV)) is a member of this large family of proteases (peptidases). DPP4 is a serine protease of family S9. DPP4 is a 240 kDa homodimeric, multi functional type II membrane bound glycoprotein, widely distributed in all mammalian tissues, but highly expressed in kidney, liver and endothelium. DPPIV is also known as DPP4, CD26, adenosine deaminase complexing protein 2 or adenosine deaminase binding protein (ADAbp). DPP4 consists of a short cytoplasmic domain of six amino acids, followed by a hydrophobic transmembrane domain (amino acids 7 28) and an extracellular (ectodomain) sequence of 739 amino acids. DPP4 is a highly specific aminopeptidase and releases dipeptides from the amino terminus of peptides with a Pro or Ala in the penultimate position. N terminal degradation of the substrate peptides may result in the activation, inactivation or modulation of their activity. Besides its well known exopeptidase activity, DPPIV also exhibits endopeptidase activity toward denatured collagen. Expression of DPPIV is associated with cell adhesion and is a co stimulant during T cell activation and proliferation.

[0117] DPPIV (DPP4, CD26) is a member of the class of proteases known as prolyl peptidases, which cleave proteins after proline residues. DPPIV, a serine dipeptidyl peptidase, cleaves the N terminal X Ala or X Pro from target polypeptides, such as chemokines (e.g., CXCL11) and peptide hormones (e.g., GLP 1, PACAP, VIP, BNP). DPPIV possesses a transmembrane region and a very short cytoplasmic domain, but is often cleaved and released as a soluble, circulating fragment. Serine proteases are grouped into 43 families. Protease family S9 is divided into four subfamilies: S9A (type prolyl oligopeptidase), S9B (DPP4), S9C (acylaminoacyl peptidase), and S9D (glutamyl endopeptidase).

[0118] In humans, members of the subfamily S9B include DPP4, fibroblast activation protein alpha (FAPα), dipeptidyl peptidase 8 (DPP8), and dipeptidyl peptidase 9 (DPP9). DPP4 is also known as adenosine deaminase binding protein (ADBP) or T cell activation antigen CD26. DPP4 is a serine exopeptidase that catalyzes the release of an N terminal dipeptide provided that the next to last residue is proline, hydroxyproline, dehydroproline or alanine.

[0119] Only oligopeptides in the trans conformation are able to bind to the active site of DPP4. It also has non peptidase functions: through its interaction with adenosine deaminase (ADA) and extracellular matrix components, it influences T cell activation and proliferation. It is thought to play roles in diabetes, cancer, and autoimmune diseases, making it a target for drug discovery. In particular, cleavage of GLP 1 (7 36) amide, an incretin hormone that stimulates insulin biosynthesis and secretion, into GLP 1 (9 36) amide by DPPIV reverses the glucoregulatory actions of GLP 1. Therefore, DPPIV inhibitors are attractive targets for stimulating insulin production in type II diabetes. Several specific DPPIV inhibitors have been approved by the FDA for type II diabetes.

[0120] The invention also provides a proteinaceous substance comprising, preferably having been provided with, an isolated first fragment of a viral protein and an isolated second fragment of an N terminal dipeptidyl peptidase protein.

[0121] Repeating binding experiments with a recombinant, isolated, fragment of the peptidase indeed confirmed the identification of the peptidase as a receptor of the MERS CoV and of the HKU4 CoV, allowing binding of the virus to a mammalian cell (both bat DPP4 as well as human DPP4 were tested), and entry of the MERS CoV leading to abundant replication of that virus in COS7 cells having been provided with the isolated second fragment, whereas COS7 cells not having been provided with the second fragment remain essentially impervious for infection with the virus.

[0122] In a further embodiment, the invention thus provides a proteinaceous substance having been provided with the isolated first probing fragment, preferably a recombinant fragment, of a viral protein and an isolated second fragment, preferably recombinant fragment, of an N terminal dipeptidyl peptidase protein, establishing a probe identified target pair of binding proteins that may be used for binding or affinity studies and preferably also for methods to identify modulators of the interaction of the binding pair.

[0123] In a further embodiment, the invention provides a proteinaceous substance comprising, preferably having been provided with, a first fragment of a viral protein and an isolated second, preferably recombinant, fragment of an N terminal dipeptidyl peptidase protein (a fragment obtained by regular peptide synthesis may also be use as first or second fragment). Such a substance provided, in particular, is useful in identifying further binding sites of viral proteins, and fragments thereof, e.g., for narrowing down of specific binding site sequences.

[0124] In a preferred embodiment, the invention provides a proteinaceous substance having been provided with at least a fragment of a viral protein, preferably an isolated fragment, wherein the viral protein comprises an ectodomain of a spike protein or of an envelope protein, the ectodomain being the most preferred site for virus cell receptor interaction.

[0125] It is preferred that a substance according to the invention comprises coronaviral protein, preferably wherein the coronaviral protein is derived from the HCoV EMC 1 virus, preferably wherein the first fragment is derived from the S1 region of a coronavirus. In a particular embodiment, the first fragment comprises residues 1 747 of the viral spike protein of HCoV EMC 1 as depicted in FIG. 16.

[0126] The invention also provides a substance according to the invention wherein the first fragment comprises, preferably consists of, at least 10, preferably of at least 50, preferably of at least 100 residues derived from the S1 region of a coronavirus. Using smaller fragments from distinct locations in the viral sequence allows for further identifying minimal essential sequences, and thereby narrowing down on the binding site, necessary for binding with the peptidase.

[0127] In particular, a substance according to the invention is provided wherein the first fragment is derived from the S1 region of a coronavirus, for example, comprising residues 1 747 as depicted in 161. Examples of such selected fragments are also found in FIG. 17, preferably the invention provides a substance with a first fragment consisting of residues 1 357, or of residues 1 588, or of residues 358 588, or of residues 358 747, or of residues 588 747 as depicted in FIG. 16 or FIG. 17, or of residues 363 593 of the spike protein of HKU4 CoV as shown in FIG. 17.

[0128] Even more in particular, a substance according to the invention is provided wherein the first fragment is derived from the S1 region of a coronavirus, which fragment then is subjected to limited proteolysis after which the protease resistant domains are identified by MS, and the interaction between probe and target is studied further.

[0129] The invention also provides a substance according to the invention wherein the peptidase belongs to protease family S9, preferably subfamily S9B, preferably wherein the peptidase is a dipeptidyl peptidase 4 (DPP4), preferably human DPP4, and preferably wherein the fragment is derived from the ectodomain of dipeptidyl peptidase. In one embodiment, it is provided that the second fragment comprises residues 39 766 of human DPP4 as depicted in FIG. 18.

[0130] The invention also provides a substance according to the invention wherein the second fragment comprises, preferably consists of, at least 10, preferably of at least 50, preferably of at least 100 residues derived from the ectodomain of dipeptidyl peptidase, such as wherein the second fragment is derived from the ectodomain of human DDP4 comprising residues 39 766 as depicted in FIG. 18.

[0131] Examples of such selected fragments are also found in FIG. 3, preferably the invention provides a substance with a second fragment consisting of residues 1 6, or of residues 1 28, or of residues 29 38, or of residues 39 51, or of residues 506 766 as depicted in FIG. 18.

[0132] Even more in particular, a substance according to the invention is provided wherein the second fragment is derived from the ectodomain of a peptidase, which fragment is then subjected to limited proteolysis after which the protease resistant domains are identified by MS, and the interaction between probe and target is studied further.

[0133] The invention also provides a substance according to the invention wherein at least one of the isolated fragments has been provided with an affinity tag, preferably a tag having affinity to binding with Protein A or a tag having affinity for binding with streptavidin.

[0134] The invention also provides a substance according to the invention consisting essentially of an isolated first fragment of a viral protein and an isolated second fragment of an N terminal peptidase protein. In a preferred embodiment, the viral protein is a coronaviral protein, preferably derived from a virus capable of infecting a human cell, whereas the peptidase protein is a DPP4 protein, preferably a human DPP4 protein.

[0135] Furthermore, a substance according to the invention is herein provided that has been subjected to crystallization, preferably a substance comprising a crystal consisting essentially of an isolated first fragment of a viral protein and an isolated second fragment of an N terminal peptidase protein. In a preferred embodiment, the viral protein is a coronaviral protein, preferably derived from a virus capable of infecting a human cell, whereas the peptidase protein is a DPP4 protein, preferably a human DPP4 protein.

[0136] The invention also provides a method for identifying a binding site comprising subjecting a crystal consisting essentially of an isolated first fragment of a viral protein and an isolated second fragment of an N terminal peptidase protein to X ray or neutron diffraction analysis. This is, for example, in order to determine the three dimensional structure of fragments of DPPIV and coronaviral protein and, in particular, to assist in the identification of its active site where fragments may bind. Knowledge of the binding site region allows rational design and construction of ligands including inhibitors. Crystallization and structural determination of fragments of DPPIV mutants and/or viral protein mutants having altered bioactivity allows the evaluation of whether such changes are caused by general structure deformation or by side chain alterations at the substitution site.

[0137] The invention also provides a container with a substance according to the invention, such as container provided with a virus according to the invention, and/or a nucleic acid according to the invention, and/or a vector according to the invention, and/or a host cell according to the invention, and/or a proteinaceous molecule according the invention, and/or an antigen according to the invention, and/or or an antibody according to the invention and/or a pharmaceutical composition according to the invention. In describing a container herein, reference is made to a test device, test tube (commonly Eppendorf tubes are used), test vessel, pipette, pipette tip, reaction device, cell culture vessel, cell culture well, reaction chamber, cover slip, crystallization chamber, crystallization device, crystallization well, microplate well, crystallization plate well, gel, column wherein, on or under a proteinaceous substance according to the invention may be placed or contained or that are useful for storing, shipping, testing or handling a proteinaceous substance provided herein.

[0138] The invention also provides a method of identifying a candidate modulator as an agent that modulates the function of a dipeptidyl peptidase, the method comprising providing a substance with a first and a second fragment according to the invention in the presence and absence of the candidate modulator under conditions permitting binding of the first fragment with the second fragment. Measuring binding of the first fragment to the second fragment, wherein a decrease or increase in binding in the presence of the candidate modulator, relative to binding in the absence of the candidate modulator, identifies the candidate modulator as an agent that modulates the function of a dipeptidyl peptidase.

[0139] The invention further provides a method of detecting, in a sample, the presence of an agent that modulates the function of a dipeptidyl peptidase, said method comprising providing a substance with a first and a second fragment according to the invention in the presence and absence of said sample under conditions permitting binding of said first fragment with said second fragment. Measuring binding of said first fragment to said second fragment, wherein a decrease or increase in binding in the presence of said sample, relative to binding in the absence of said sample, identifies said sample as comprising an agent that modulates the function of a dipeptidyl peptidase.

[0140] The invention further provides a method of identifying a candidate modulator as an agent that modulates the function of a dipeptidyl peptidase, said method comprising providing a substance with a first and a second fragment according to the invention in the presence and absence of said candidate modulator under conditions permitting determining enzymatic activity of a peptidase. Measuring enzymatic activity of a peptidase, wherein a decrease or increase in enzymatic in the presence of said candidate modulator, relative to binding in the absence of said candidate modulator, identifies said candidate modulator as an agent that modulates the function of a dipeptidyl peptidase.

[0141] The invention further provides a method of detecting, in a sample, the presence of an agent that modulates the function of a dipeptidyl peptidase, said method comprising providing a substance with a first and a second fragment according to the invention in the presence and absence of said sample under conditions permitting determining enzymatic activity of a peptidase. Measuring enzymatic activity of a peptidase, wherein a decrease or increase in enzymatic in the presence of said sample, relative to binding in the absence of said sample, identifies said sample as comprising an agent that modulates the function of a dipeptidyl peptidase.

[0142] In a preferred embodiment, the invention further provides a method of identifying a candidate modulator as an that modulates the function of a dipeptidyl peptidase or a provides a method of detecting, in a sample, the presence of an agent that modulates the function of a dipeptidyl peptidase wherein said first fragment and/or said second fragment is detectably labeled, preferably wherein said first fragment and/or said second fragment is detectably labeled with a moiety selected from the group consisting of a radioisotope, a fluorophore, a quencher of fluorescence, an enzyme, and an affinity tag. It is also provided that said substance comprises a cell expressing said first fragment and/or said second fragment.

[0143] The invention also provides use of a substance, a container or a method according to the invention for identifying an agent that modulates the function of a peptidase or a viral protein, use of an isolated fragment of a viral protein as an agent that modulates the function of an N-terminal dipeptidyl peptidase, and use of an isolated fragment of a N-terminal dipeptidyl peptidase as an agent that modulates the function of a viral protein.

[0144] The invention further provides use of an inhibitor, preferably adenosine, or a functional equivalent thereof, of N-terminal dipeptidyl peptidase cell-surface expression on a cell, as a modulator or antiviral agent for inhibition of replication of a virus in said cell, in particular wherein said peptidase is DPP4, preferably human DPP4, preferably wherein said virus is a Coronavirus.

[0145] Also, the invention provides vaccines against HCoV SA1 (based on nucleic acid or amino acid sequences or antigenic polypeptides of the HCoV SA1 genome, and the invention provides use of antiviral drugs directed against nucleic acid or amino acid sequences or polypeptides of the HCoV SA1 (herein also called MERS HCoV) genome, as herein provided. At this time, it is not known if there is a cure for the disease. Several antiviral therapies have been applied, but with various results. Also, for being able to prevent spread of the disease, it is of great importance to be able to recognize the disease in an early stage. Only then, sufficient measures can be taken to isolate patients and initiate quarantine precautions.

[0146] The invention also provides an isolated or recombinant proteinaceous molecule or MERS-CoV-specific fragment thereof encoded by a nucleic acid according to the invention. In a preferred embodiment, the invention provides a proteinaceous molecule or corona MERS-CoV-specific viral protein or fragment thereof encoded by a nucleic acid according to the invention. Useful proteinaceous molecules are, for example, derived from any of the genes or genomic fragments derivable from a virus according to the invention. Such molecules or antigenic fragments thereof, as provided herein, are, for example, useful in diagnostic methods or kits and in pharmaceutical compositions such as sub unit vaccines and inhibitory peptides. Particularly useful is the viral polymerase protein, the spike protein, the nucleocapsid or antigenic fragments thereof for inclusion as antigen or subunit immunogen, but inactivated whole virus can also be used.

[0147] Particularly useful are also those proteinaceous substances that are encoded by recombinant nucleic acid fragments that are identified for phylogenetic analyses, of course, preferred are those that are within the preferred bounds and metes of ORFs useful in phylogenetic analyses, in particular, for eliciting MERS-CoV-specific antibodies, whether in vivo (e.g., for protective purposes or for providing diagnostic antibodies) or in vitro (e.g., by phage display technology or another technique useful for generating synthetic antibodies). Similarly, the invention provides an antigen comprising a proteinaceous molecule or MERS-CoV-specific fragment thereof according to the invention, or reactive with an antibody according to the invention.

[0148] Also provided herein are antibodies, be it natural polyclonal or monoclonal, or synthetic (e.g., (phage) library derived binding molecules) antibodies that specifically react with an antigen comprising a proteinaceous molecule or HCoV virus like MERS-CoV-specific fragment thereof according to the invention. A person skilled in the art will be able to develop (monoclonal) antibodies using isolated virus material and/or recombinantly expressed viral proteins. Sui et al. (Proc. Natl. Acad. Sci. 101(8):2536 2541, 2004) have transiently expressed fragments of the spike protein and found several antibodies through phage display methods. Such antibodies are also useful in a method for identifying a viral isolate as a MERS HCoV virus like virus comprising reacting the viral isolate or a component thereof with an antibody as provided herein. This can, for example, be achieved by using purified or non purified HCoV SA1 virus like virus or parts thereof (proteins, peptides) using ELISA, RIA, FACS or similar formats of antigen detection assays (Current Protocols in Immunology). Alternatively, infected cells or cell cultures may be used to identify viral antigens using classical immunofluorescence or immunohistochemical techniques. Specifically useful in this respect are antibodies raised against MERS HCoV virus like virus proteins that are encoded by a nucleotide sequence comprising one or more of the fragments disclosed herein.

[0149] In particular, MERS HCoV virus like polypeptide or fragments are provided herein as well, such as those provided in FIG. 16 or FIG. 17, in particular, fragments derived from a viral spike protein, preferably the S1 spike protein, in particular, fragments of the S1 protein, such as fragment 1 357, or fragment 358 747, or fragment 358-588, or homologues thereof, as depicted in FIG. 17, or fragment 363 593 of the spike protein of HKU4 Co, as shown in FIG. 32, are herein provided. Also, isolated or recombinant nucleic acid, or MERS-CoV-specific fragments thereof that are obtainable from a MERS HCoV virus are provided, such as nucleic acid encoding fragments of the S1 protein, such as fragment 1 357, or fragment 358 747, or fragment 358-588, or homologues thereof, as depicted in FIG. 17, as are a vector or plasmid comprising a nucleic acid according to the invention, and a cell, such as host cell, such as a 293T cell comprising a nucleic acid or vector (vector comprising plasmid herein) according to the invention.

[0150] The invention also provides an isolated or recombinant proteinaceous molecule or MERS-CoV-specific fragment thereof encoded by a nucleic acid according to the invention. In a preferred embodiment, the invention provides a proteinaceous molecule or MERS-CoV-specific viral protein or fragment thereof encoded by a nucleic acid according to the invention for use in a vaccine. Useful proteinaceous molecules are, for example, derived from any of the genes or genomic fragments derivable from a virus or fragment thereof according to the invention. Such molecules, or antigenic fragments thereof, as provided herein, are, for example, useful in diagnostic methods or kits and in pharmaceutical compositions such as sub unit vaccines and inhibitory peptides.

[0151] Particularly useful are the viral polymerase protein, the spike protein, the nucleocapsid or antigenic fragments thereof for inclusion in a vaccine as antigen or subunit immunogen, in particular, fragments derived from a viral spike protein, preferably the S1 spike protein is provide for use in a vaccine, in particular, fragments of the S1 protein, such as fragment 1 357, or fragment 358 747, or fragment 358-588, or homologues thereof, as depicted in FIG. 17 that were are shown herein to interact with DPP4 and to elicit neutralizing antibodies, or fragment 363 593 of the spike protein of HKU4 Co remarkably interacting with DPP4 as well, as shown in FIG. 32, but inactivated whole virus can also be used in a vaccine. Particularly useful are those proteinaceous substances that are encoded by recombinant nucleic acid fragments that are identified for phylogenetic analyses, of course, preferred are those that are within the preferred bounds and metes of ORFs useful in phylogenetic analyses, in particular, for eliciting MERS-CoV specific antibodies, whether in vivo (e.g., for protective purposes such as by vaccination or for providing diagnostic antibodies) or in vitro (e.g., by phage display technology or another technique useful for generating synthetic antibodies). Similarly, the invention provides an antigen comprising a proteinaceous molecule or MERS-CoV-specific fragment thereof according to the invention, reactive with an antibody according to the invention. Such an antibody as herein provided is preferably reactive with a fragment of the S1 protein, such as fragment 1 357, or fragment 358 747, preferably fragment 358-588, of MERS-CoV or homologues thereof, as depicted in FIGS. 17 and 32.

[0152] The invention also provides a pharmaceutical composition comprising a virus, a nucleic acid, a proteinaceous molecule or fragment thereof, preferably consisting of the amino acid sequence 358 588 of MERS CoV or of the sequence 363 593 of the spike protein of HKU4 CoV, more preferably having at least a part of the amino acid sequence 358 588 of MERS CoV or of the sequence 363 593 of the spike protein of HKU4 CoV as depicted herein.

[0153] An antigen and/or an antibody according to the invention can, for example, be used in a method for the treatment or prevention of a MERS HCoV infection and/or a respiratory illness comprising providing an individual with a pharmaceutical composition according to the invention, for example as a vaccination against useful against infection with corona viruses that use DPP4 as a virus receptor such as seen with MERS-CoV infection or HKU4-CoV infection. This is most useful when the individual comprises a human. Antibodies directed against MERS HCoV proteins, especially against the spike protein of MERS HCoV, preferably against the amino acid sequence 358 588 or the sequence 363 593 of the spike protein of HKU4 CoV, or more preferably directed against at least a part of the amino acid sequence 358 588 of MERS CoV or of the sequence 363 593 of the spike protein of HKU4 Co are herein also provided and are useful for prophylactic or therapeutic purposes, as passive vaccines or part of an anti-serum useful to protect against infection with corona viruses that use DPP4 as a virus receptor, such as MERS-CoV or HKU4-CoV. It is known from other coronaviruses that the spike protein is a very strong antigen and that antibodies against spike protein can be used in prophylactic and therapeutic treatment.

[0154] The invention also proteinaceous substance having been provided with a isolated or recombinant proteinaceous molecule or MERS-CoV-specific fragment thereof encoded by a nucleic acid according to the invention and additionally comprising at least a fragment of an N-terminal dipeptidyl peptidase protein. In a preferred embodiment, the invention provides a proteinaceous substance having been provided with a proteinaceous molecule or MERS-CoV-specific viral protein or fragment thereof encoded by a nucleic acid according to the invention. Useful proteinaceous molecules are for example derived from any of the genes or genomic fragments or open reading frames (ORFs) derivable from a virus according to the invention. Particularly useful are the viral polymerase protein, the spike protein, the nucleocapsid or antigenic fragments thereof, but inactivated whole virus can also be used. Particularly useful are also those proteinaceous substances that are encoded by recombinant nucleic acid fragments that are identified for phylogenetic analyses, of course preferred are those that are within the preferred bounds and metes of ORFs useful in phylogenetic analyses, in particular for eliciting MERS-CoV specific antibodies,

[0155] The invention also proteinaceous substance having been provided with a isolated or recombinant proteinaceous molecule according to the invention or MERS-CoV-specific fragment thereof wherein said proteinaceous molecule comprises an ectodomain of a spike protein, said ectodomain preferably derived from the S1 region of a coronavirus. In another preferred embodiment, the invention also proteinaceous substance having been provided with a isolated or recombinant proteinaceous molecule or MERS-CoV-specific fragment thereof wherein said peptidase protein is a dipeptidyl peptidase 4 (DPP4), preferably human DPP4, or a fragment of DPP4.

[0156] Typically the invention provides a proteinaceous substance having been provided with an isolated or recombinant proteinaceous molecule or MERS-CoV-specific fragment thereof encoded by a nucleic acid according to the invention and additionally comprising at least a fragment of an N-terminal dipeptidyl peptidase protein, said substance having been subjected to crystallization. The invention also provides a container provided with a proteinaceous substance having been provided with a isolated or recombinant proteinaceous molecule according to the invention or fragment thereof encoded by a nucleic acid according to the invention and additionally having been provided with or comprising at least a fragment of an N-terminal dipeptidyl peptidase protein.

[0157] The invention also provides a method of identifying a candidate modulator as an agent that modulates the function of a dipeptidyl peptidase, said method comprising: providing a proteinaceous substance according to the invention in the presence and absence of said candidate modulator under conditions permitting binding of said proteinaceous molecule of first fragment of viral fragment with said fragment of said peptidase protein, measuring binding of said molecule to said fragment, wherein a decrease or increase in binding in the presence of said candidate modulator, relative to binding in the absence of said candidate modulator, identifies said candidate modulator as an agent that modulates the function of a dipeptidyl peptidase. It is preferred that said molecule and/or said fragment is detectably labeled, preferably with a moiety selected from the group consisting of a radioisotope, a fluorophore, a quencher of fluorescence, an enzyme, and an affinity tag.

[0158] The invention also provides use of at least a fragment of a viral protein as an agent that modulates the function of an N-terminal dipeptidyl peptidase, for example such use is provided herein in a method according to the invention. Similarly, the invention provides use of a fragment of an N-terminal dipeptidyl peptidase as an agent that modulates the function of a viral protein for example such use is provided herein in a method according to the invention. The invention also provides use of an inhibitor of N-terminal dipeptidyl peptidase, such as ADA, or a functional equivalent thereof, in a method for detecting inhibition of replication of a virus in a cell, preferably wherein said peptidase is DPP4, more preferably wherein said virus is a Coronavirus. The invention also provides use of an inhibitor of N-terminal dipeptidyl peptidase cell-surface expression, such as adenosine, or a functional equivalent thereof, in a method for detecting inhibition of replication of a virus in a cell, preferably wherein said peptidase is DPP4, more preferably wherein said virus is a Coronavirus.

[0159] The invention thus further provides a method of detecting, in a sample, the presence of an agent that modulates the function of a dipeptidyl peptidase, the method comprising providing a substance with a first and a second fragment according to the invention in the presence and absence of the sample under conditions permitting binding of the first fragment with the second fragment. Measuring binding of the first fragment to the second fragment, wherein a decrease or increase in binding in the presence of the sample, relative to binding in the absence of the sample, identifies the sample as comprising an agent that modulates the function of a dipeptidyl peptidase.

[0160] The invention further provides a method of identifying a candidate modulator as an agent that modulates the function of a dipeptidyl peptidase, the method comprising providing a substance with a first and a second fragment according to the invention in the presence and absence of the candidate modulator under conditions permitting determining enzymatic activity of a peptidase. Measuring enzymatic activity of a peptidase, wherein a decrease or increase in enzymatic activity in the presence of the candidate modulator, relative to binding in the absence of the candidate modulator, identifies the candidate modulator as an agent that modulates the function of a dipeptidyl peptidase.

[0161] The invention further provides a method of detecting, in a sample, the presence of an agent that modulates the function of a dipeptidyl peptidase, the method comprising providing a substance with a first and a second fragment according to the invention in the presence and absence of the sample under conditions permitting determining enzymatic activity of a peptidase. Measuring enzymatic activity of a peptidase, wherein a decrease or increase in enzymatic activity in the presence of the sample, relative to binding in the absence of the sample, identifies the sample as comprising an agent that modulates the function of a dipeptidyl peptidase.

[0162] In a preferred embodiment, the invention further provides a method of identifying a candidate modulator as an agent that modulates the function of a dipeptidyl peptidase or provides a method of detecting, in a sample, the presence of an agent that modulates the function of a dipeptidyl peptidase, wherein the first fragment and/or the second fragment is detectably labeled, preferably wherein the first fragment and/or the second fragment is detectably labeled with a moiety selected from the group consisting of a radioisotope, a fluorophore, a quencher of fluorescence, an enzyme, and an affinity tag. It is also provided that the substance comprises a cell expressing the first fragment and/or the second fragment. The invention also provides a method of identifying a candidate modulator as an agent that modulates the function of a dipeptidyl peptidase, said method comprising providing a proteinaceous substance according to the invention in the presence and absence of said candidate modulator under conditions permitting binding of a first fragment derived from a virus with a second fragment derived from a peptidase protein, and measuring binding of said first to said second fragment, wherein a decrease or increase in binding in the presence of said candidate modulator, relative to binding in the absence of said candidate modulator, identifies said candidate modulator as an agent that modulates the function of a dipeptidyl peptidase, it is preferred that said first and/or said second fragment is detectably labeled, preferably with a moiety selected from the group consisting of a radioisotope, a fluorophore, a quencher of fluorescence, an enzyme, and an affinity tag. The invention also provides a method of identifying a candidate antiviral agent as an agent that modulates the binding of a virus to dipeptidyl peptidase, said method comprising providing a proteinaceous substance according to the invention in the presence and absence of said candidate antiviral agent under conditions permitting binding of a first fragment derived from a virus with a second fragment derived from a peptidase protein, measuring binding of said first to said second fragment, wherein a decrease or increase in binding in the presence of said antiviral agent, relative to binding in the absence of said candidate modulator, identifies said antiviral agent as an agent that modulates the function of a dipeptidyl peptidase. It is preferred that said first and/or second fragment is detectably labeled, preferably with a moiety selected from the group consisting of a radioisotope, a fluorophore, a quencher of fluorescence, an enzyme, and an affinity tag.

[0163] The invention also provides use of a substance, a container or a method according to the invention for identifying an agent that modulates the function of a peptidase or a viral protein, use of an isolated fragment of a viral protein, preferably of a viral spike protein as provided herein, or recombinant or synthetic peptide derived thereof as provided herein, as an agent that modulates the function of an N terminal dipeptidyl peptidase, and use of an isolated fragment of a N terminal dipeptidyl peptidase, preferably of a soluble fragment of said peptidase as provided herein, or recombinant or synthetic peptide derived thereof as provided herein, as an agent that modulates the function of a viral protein. The invention further provides use of an inhibitor, preferably ADA, or a functional equivalent thereof, of N terminal dipeptidyl peptidase activity of a cell, for inhibition of replication of a virus in a cell, in particular, wherein the peptidase is DPP4, preferably human DPP4, preferably wherein the virus is a Coronavirus. The invention further provides use of an inhibitor, preferably adenosine, or a functional equivalent thereof, of N terminal dipeptidyl peptidase cell surface expression on a cell, for inhibition of replication of a virus in a cell, in particular, wherein the peptidase is DPP4, preferably human DPP4, preferably wherein the virus is a Coronavirus.

[0164] In describing protein or peptide composition, structure and function herein, reference is made to amino acids. In the present specification, amino acid residues are expressed by using the following abbreviations. Also, unless explicitly otherwise indicated, the amino acid sequences of peptides and proteins are identified from N terminal to C terminal, left terminal to right terminal, the N terminal being identified as a first residue. Ala: alanine residue; Asp: aspartate residue; Glu: glutamate residue; Phe: phenylalanine residue; Gly: glycine residue; His: histidine residue; Ile: isoleucine residue; Lys: lysine residue; Leu: leucine residue; Met: methionine residue; Asn: asparagine residue; Pro: proline residue; Gln: glutamine residue; Arg: arginine residue; Ser: serine residue; Thr: threonine residue; Val: valine residue; Trp: tryptophane residue; Tyr: tyrosine residue; Cys: cysteine residue. The amino acids may also be referred to by their conventional one letter code abbreviations; A=Ala; T=Thr; V=Val; C=Cys; L=Leu; Y=Tyr; I=Ile; N=Asn; P=Pro; Q=Gln; F=Phe; D=Asp; W=Trp; E=Glu; M=Met; K=Lys; G=Gly; R=Arg; S=Ser; and H=His.

### FIGURE LEGENDS

[0165] FIG. 1. Light microscopy images of LLC-MK2 cells (A, B) and VERO cells (C, D) inoculated with phosphate-buffered saline (A, C) or novel human coronavirus HCoV-SA1 (B, D) 5 days after inoculation.

[0166] FIG. 2. Results of pan-coronavirus PCR. Various samples (numbered 1-12) of cell culture supernatants infected with HCoV-SA1 reacted with a pair of primers specific for the coronavirus family. A positive control virus (HCoV-NL63) was also reactive.

[0167] FIG. 3. Partial open reading frame of HCoV-SA1.

[0168] FIG. 4. Maximum Likelihood tree of partial polymerase gene sequences of representative coronaviruses. HCoC-SA1 is shown in the cluster on the right hand side of the tree, labeled as “New HCoV”. The cluster of viruses at the top represents viruses in the genus alphacoronavirus. The Beluga whale coronavirus (BWCoV) represents a gammacoronavirus, while the Bulbul-CoV and IBV represent a proposed new genus of the coronavirinae.

[0169] FIG. 5 file N.rtf nucleocapsid (N) protein

[0170] FIG. 6 file M.rtf matrix (M) protein

[0171] FIG. 7 file E.rtf small envelope (E) protein

[0172] FIG. 8 file NS3d.rtf non-structural gene NS3d

[0173] FIG. 9 file NS3c.rtf non-structural gene NS3c

[0174] FIG. 10 file NS3b.rtf non-structural gene NS3b

[0175] FIG. 11 file NS3a.rtf non-structural gene NS3a

[0176] FIG. 12 file S.rtf spike surface glycoprotein (S)

[0177] FIG. 13 file Orf1ab.rtf encoding many enzymatic products among which the replicase

[0178] FIG. 14 file HCoV-SA1.rtf

[0179] FIG. 15 HCoV-SA1.rtf translation 3 frames

[0180] FIG. 16 Amino acid sequence of the spike protein of HCoV EMC (HCoV SA1). Panel A, schematic presentation of the HCoV EMC S and S1 Fc fusion protein. Position of the predicted N glycosylation sites (W; predicted by the NetNGlyc server) and TM domain (yellow bar; predicted by the TMHMM server) are indicated in the full length S protein. The border between the S1 and S2 subunits is marked by the presence of a predicted furin cleavage site (red triangle; predicted by the ProP 1.0 server). Residues 1 747 comprise the N terminal region. Panel B, amino acid sequence of the spike protein with the S1 region indicated in red.

[0181] FIG. 17 Amino acid sequence and domain structure of residues 1 747 of the S1 spike protein of HCoV EMC (HCoV SA1). RBD=Receptor Binding Region.

[0182] FIG. 18 Domain structure and amino acid sequence of residues 1 766 of human DPP IV, domain borders based on crystal structure (Rasmussen, Nat. Struct. Biol. 2003, herein included by reference).

[0183] FIG. 19 Binding of HCoV EMC S1 is correlated to infection with HCoV EMC in vero cells (Panel A), Cos 7 cells (Panel B) Huh7 cells (Panel C) and bat cells (Panel D). Shown on the left is the FACS analysis of HCoV EMC S1 binding (red line), a feline CoV S1 protein as control (blue line) and non stained cells (black line). In the middle panels, HCoV EMC infected cells are visualized using an antiserum that recognizes the NSp4 protein and on the left, supernatants of the infected cells are tested by Taqman for the presence of viral transcripts at 0, 20 and 40 hours after infection.

[0184] FIG. 20 Immunoprecipitation with S1 on Huh7 cells and mass spec analysis reveals cd26 as the interacting protein.

[0185] FIG. 21 Peptides identified in fraction 2 are indicated in red and relate to the fragment or topological domain involving residues 29 766 comprising the extracellular region (ectodomain) of the membrane bound DPP4 (Uniprot identifier P27487) but do not relate to the cytoplasmic domain (residues 1 6) nor to the helical Signal anchor for type II membrane protein domain (residues 7 28) of membrane bound DPP4. Soluble DPP4 runs from residue 39 to residue 766.

[0186] FIG. 22 HCoV EMC and SARS CoV S1 Fc proteins (2.5 μg) were mock incubated or incubated with 12.5 μg soluble DPP IV (sDPP IV) or soluble ACE2 (sACE2) in 100 μl PBS. Precipitates were washed thrice with lysis buffer and once with PBS, and subjected to a NOVEX® 4 12% Tris Glycine gradient gel (Invitrogen) under non reducing conditions.

[0187] FIG. 23 Cells were washed twice with ice cold PBS, scraped off the plastic with a rubber policeman and suspended into single cells by pipetting cells up and down. S1 binding of cells was measured by incubating 2.5×105 cells with 15 μg/ml of S1 Fc followed by incubation with the fluorescent dye Alexa488 labeled goat anti human IgG antibody and analyzed by flow cytometry.

[0188] FIG. 24 Inhibition of HCoV EMC replication in Huh7 cells by antibodies to DPP4. Huh7 cells were incubated with 20 μg/ml goat polyclonal antiserum against DPP4, a goat antiserum against ACE2, normal goat serum or left untreated. After 1 hour incubation, the cells were infected with HCoV EMC at a multiplicity of infection of 0.01 and left for 1 hour. Cells were washed twice and again incubated with medium containing the respective antibodies. Supernatant collected at 2 hours (open bars) and 20 hours (closed bars) was tested for presence of HCoV using a Taqman assay. Results are shown as Δ Ct. HCoV EMC infection of Huh7 cells is inhibited by antibodies to DPP4 but not by the other antibodies tested.

[0189] FIG. 25 Cos7 cells transfected with plasmids encoding human DPP4 (hDPP4) or bat DPP4 (bDPP4), a control plasmid (pcDNA) or left untreated were infected with HCoV EMC at a multiplicity of infection of 1 and left for 1 hour. Cells were washed twice and supernatant collected at 2 hours (open bars), 20 hours (blue bars) and 40 hours (red bars) was tested for presence of HCoV using a Taqman assay. Results are shown as A Ct.

[0190] FIG. 26 Blocking of DPP4-S1 binding by antibodies directed against S1 serum from a macaque infected with HCoV EMC inhibits binding of recombinant S1 to Huh7 cells. Serum at a dilution of 1:20, obtained from macaques at day 0 (blue line) and day 14 (red line) after infection with 5×107 TCID50 HCoV EMC, was preincubated for 1 hour at room temperature with 1.25 μg/ml recombinant S1 protein that was biotinylated and subsequently incubated on Huh7 cells. After treatment with FITC-labeled streptavidin, cells were analyzed for fluorescence. In gray background, binding using a control biotinylated protein is shown.

[0191] FIG. 27 Inhibition of HCoV EMC replication in Huh7 cells by soluble adenosine deaminase (ADA). Huh7 cells were incubated with different concentrations of recombinant soluble ADA (closed bars) or recombinant soluble ACE2 (open bars). After 1 hour incubation, the cells were infected with HCoV EMC at a multiplicity of infection of 0.01. After 8 hours, cells were fixed and stained with a rabbit antiserum against HCoV EMC nsp4 and cells were counted. Results are shown as number of infected cells per well. Infection of Huh7 cells is inhibited by recombinant soluble ADA but not by recombinant soluble ACE2.

[0192] FIG. 28 Inhibition of HCoV EMC replication in Huh7 cells by soluble DPP4. Different concentrations of recombinant soluble DPP4 (open bars) or recombinant soluble ACE2 (closed bars) were incubated with HCoV EMC for 1 hour at 37° C. and used to infect Huh7 cells. After 8 hours, cells were fixed and stained with a rabbit antiserum against HCoV EMC nsp4 and cells were counted. Results are shown as number of infected cells per well. Infection of Huh7 cells is inhibited by recombinant soluble DPP4 but not by recombinant soluble ACE2.

[0193] FIG. 29 Receptor binding domains in betacoronavirus spike proteins and S1 Fc expression constructs. Panel a), schematic representation of the betacoronaviruses SARS CoV, hCoV EMC S and MHV (strain A59) spike (S) protein sequence (drawn to scale) aligned at the S1 S2 junction. The known receptor binding domain in the S1 subunit of MHV and SARS CoV S proteins and their corresponding homologous regions in hCoV EMC S as defined by ClustalW alignment are indicated. Positions of the transmembrane domain (yellow bar; predicted by the TMHMM server) and of the predicted N glycosylation sites (W; predicted by the NetNGlyc server, only shown for the hCoV EMC S) are indicated. The border between the S1 and S2 subunits of the spike protein is represented by a vertical white line. Panel b), upper panel, schematic presentation of the hCoV EMC S1 subunit (residues 1 751) sequence. Cysteine positions in S1 subunit are indicated by vertical white lines with corresponding amino acid positions on top. Positions of cysteines highly conserved among betacoronaviruses S1 proteins are in bold. Predicted disulfide bond connections inferred from the structure of the SARS CoV receptor binding domain are presented as connecting black lines underneath. Lower panel, domains of the hCoV EMC S1 subunit expressed as Fc chimeras.

[0194] FIG. 30 The DPP4 binding domain is located within residues 358 588 of the hCoV EMC spike protein and efficiently elicits neutralizing antibodies. Panel a), S1 Fc chimeric proteins and soluble DPP4 (sDPP4) receptor were expressed from HEK 293T cells and purified from the culture supernatant. S1 Fc proteins were mixed with sDPP4 followed by protein A sepharose affinity isolation, analyzed on a NOVEX® 4 12% Tris Glycine gradient gel under non reducing conditions, and stained with GelCodeBlue reagent. Position of the S1 Fc proteins, running as dimers under non reducing conditions due to an Fc interchain disulphide bond, and sDPP4 as well as the sizes of the marker proteins are indicated. Individual proteins were loaded as controls. Panel b), binding of hCoV EMC S1 Fc proteins to DPP4 expressing cells. 2.5×105 HEK 293T cells transfected with control pCAGGS (grey shaded area) or with pCAGGS DPP4 (black line) expression plasmid were incubated with 15 μg/ml of the indicated S1 Fc followed by incubation with DyLight488 labeled goat anti human IgG antibody and analysis by flow cytometry. An Fc chimera containing the S1 of infectious bronchitis virus (IBV S1 Fc) was taken along as a negative control. Panel c), neutralization of hCoV EMC infection by rabbit antisera raised against the S1 Fc 1 747, 1 357 and 358 588 variants. Virus (100 pfu) was premixed 1:1 with serial dilutions of sera obtained (open bars) or after immunization (closed bars) prior to inoculation onto VERO cells and virus infection was monitored by the occurrence of CPE at 72 hours post infection. Virus neutralization titers (VNT) were determined in quadruplicate as the highest serum dilutions that completely prevent CPE. The experiment was carried out twice and the data of one representative experiment are shown.

[0195] FIG. 31 Localization of receptor binding domains in coronavirus spike proteins. Schematic presentation of the spike proteins of the alphacoronaviruses TGEV and hCoV NL63 and of the betacoronaviruses SARS CoV, hCoV EMC and MHV (drawn to scale), aligned at the S1 S2 junction. Blue boxes represent the receptor binding domains (RBD) and indicate the engaged receptor. The RBD of TGEV, hCoV NL63, SARS CoV and MHV have been confirmed by crystallography (12, 15, 22, 26). Grey boxes indicate the transmembrane domain. Sequence IDs: TGEV (ABG89335.1), hCoV NL63 (NC_{—}005831.2), SARS CoV (NP_{—}828851.1), hCoV EMC (AFS88936.1), MHV (NC_{—}001846.1).

[0196] FIG. 32 Residues 363 593 of the spike protein of HKU4 CoV bind to human DPP4. Shown is the binding ability of different S1 Fc proteins to DPP4 expressing cells. 2.5×105 HEK 293T cells transfected with control pCAGGS (grey shaded area) or with pCAGGS DPP4 (black line) expression plasmid were incubated with 15 μg/ml of the hCoV EMC S1 Fc followed by incubation with DyLight488 labeled goat anti human IgG antibody and analysis by flow cytometry. S1 Fc protein chimeras were tested containing the hCoV EMC S1 subunit (residues 1 747), the hCoV EMC spike receptor binding domain (RBD; residues 358 588) or the hCoV EMC RBD homologous regions of the spike proteins of HKU4 CoV (residues 363 593) and HKU5 CoV (residues 366 586). Mock incubated cells (mock) or cells incubated with an Fc chimera containing the S1 of feline infectious peritonitis virus (FIPV S1 Fc) was taken along as negative controls.

[0197] HKU4 CoV spike (S) protein ID [YP_{—}001039953.1].

[0198] HKU5 CoV spike (S) protein ID [YP_{—}001039962.1].

[0199] Region in S homologous to hCoV EMC RBD highlighted in yellow.

[0200] FIG. 33. Characterization of the functional MERS-CoV DPP4 receptor S1 binding site.

[0201] A, Different plasmids encoding either full length human DPP4, ferret DPP4 or human-ferret DPP4 chimera's (human-ferret-human and ferret-human ferret, HFH and FHF respectively) were constructed. B, DPP4 expression and S1 binding to cells transfected with different DPP4 constructs as analysed by FACS analysis. C, MERS-CoV RNA levels in supernatants of DPP4 transfected cells infected with MERS-CoV at 2 and 20 h after infection

[0202] using a TaqMan assay, expressed as genome equivalents (GE; half maximal tissue-culture infectious dose (TCID50) per ml). D, S1 binding to cells transfected with different hDPP4 mutants. E, MERS-CoV infection of cells transfected with different hDPP4 constructs. Data in panel a and b were corrected for DPP4 expression of the different constructs.

### DETAILED DESCRIPTION

### Novel human coronavirus HCoV-SA1

[0203] Classification:

[0204] Order: Nidovirales

[0205] Family: Coronaviridae

[0206] Subfamily: Coronavirinae

[0207] Genus: Betacoronavirus

[0208] Lineage: C

### Example 1

[0209] Virus was isolated from a 60-year old man with acute pneumonia and acute renal failure in Saudi Arabia.

[0210] Virus was isolated from sputum specimen in VERO cells and LLC-MK2 cells.

[0211] Five days after inoculation, cytopathic effects were observed, consisting of rounding of the cells, detachment of cells, and syncytium formation (FIG. 1).

[0212] Cells in the original sputum sample and infected cultured cells were also tested with specific antibodies against influenza A and B viruses, parainfluenza viruses types 1-3, respiratory syncytial virus, and adenovirus, but such tests yielded negative results. Sputum specimens and infected cell culture supernatants did not react in PCR-based assays specific for paramyxoviruses, enteroviruses, and adenoviruses. However, these samples did react with PCR-based assays to detect all coronaviruses. A 251 nucleotide fragment was amplified with one such test (Vijgen, L., E. Moes, E. Keyaerts, S. Li, and M. Van Ranst. 2008. A pancoronavirus RT-PCR assay for detection of all known coronaviruses. Methods Mol Biol 454:3-12). A second PCR-based assay to detect all coronaviruses (Drosten C, Gunther S, Preiser W, van der Werf S, Brodt H R, Becker S, Rabenau H, Panning M, Kolesnikova L, Fouchier R A, Berger A, Burguière A M, Cinatl J, Eickmann M, Escriou N, Grywna K, Kramme S, Manuguerra J C, Müller S, Rickerts V, Sturmer M, Vieth S, Klenk H D, Osterhaus A D, Schmitz H, Doerr H W. Identification of a novel coronavirus in patients with severe acute respiratory syndrome. N Engl J Med. 348, 1967-76 (2003)) also yielded positive results (FIG. 2).

### Example 2

[0213] Viral RNA was isolated from infected cell culture supernatants using a High Pure RNA Isolation Kit (Roche). Extracted RNA was copied to cDNA by reverse transcriptase using random hexamers. Pan-coronavirus polymerase chain reaction (PCR) was used to amplify a conserved region of open reading frame 1b (Drosten C, Gunther S, Preiser W, van der Werf S, Brodt H R, Becker S, Rabenau H, Panning M, Kolesnikova L, Fouchier R A, Berger A, Burguiere A M, Cinatl J, Eickmann M, Escriou N, Grywna K, Kramme S, Manuguerra J C, Müller S, Rickerts V, Sturmer M, Vieth S, Klenk H D, Osterhaus A D, Schmitz H, Doerr H W. Identification of a novel coronavirus in patients with severe acute respiratory syndrome. N Engl J Med. 348, 1967-76 (2003)). The PCR fragments of the pan-coronavirus PCRs were sequenced. To this end, PCR products were purified from the gel and sequenced using a BigDye Terminator v3.1 Cycle sequencing kit (Applied Biosystems, Nieuwerkerk a/d IJssel, the Netherlands) and a 3130XL genetic analyzer (Applied Biosystems), according to the instructions of the manufacturer. The sequence clearly corresponded with conserved region of open reading frame 1b of a coronavirus (FIG. 3).

### Example 3

[0214] Reference coronavirus genome sequences were downloaded from GenBank and the part of the genomes that corresponded with the amplified fragment of HCoV-SA1 were aligned. A Maximum Likelihood tree was constructed to infer the phylogenetic relationships (FIG. 4). This phylogenetic tree showed that the new HCoV-SA1 belongs to lineage C of the genus Betacoronavirus, along with the bat coronaviruses HKU4 and HKU5. The Betacoronavirus genus contains 3 additional lineages (A, B, D). HCoV-HKU1 and HCoV-OC43 belong to lineage A while SARS-CoV belongs to lineage B. Lineage D does not contain any human pathogens, and is represented in the tree by Rousettus bat coronavirus HKU9.

[0215] HCoV-SA1 is thus clearly distinct from previously known human coronaviruses. HCoV-NL63 and HCoV-229E are even more distinct from HCoV-SA1, since these two human pathogens belong to a different genus, the Alphacoronavirus genus.

### Example 4

[0216] To further characterize the virus genome, viral RNA was extracted from infected cell culture supernatant using the High Pure RNA Isolation Kit (Roche). RNA was subjected to reverse transcriptase using circular permuted primers (Welsh, J. & McClelland, M. Fingerprinting genomes using PCR with arbitrary primers. Nucleic Acids Res. 18, 7213-7218 (1990)) that were extended with random hexamer sequences. The amount of DNA was amplified by polymerase chain reaction (PCR), using the circular permuted primers. The randomly amplified fragments were sequenced using the 454/Roche GS-FLX sequencing platform. A fragment library was created according to the manufacturer's protocol without DNA fragmentation (GS FLX Titanium Rapid Library Preparation, Roche). The emPCR (Amplification Method Lib-L) and GS junior sequencing run was performed according to instructions of the manufacturer (Roche). The sequence reads were trimmed at 30 nucleotides from the 3′ and 5′ ends to remove all primer sequences. Sequence reads from the GS-FLX sequencing data were assembled into contigs using CLC Genomics software 4.6.1. Using this “deep-sequencing” approach on the 454-sequencing platform, approximately 80% of the virus genome sequence was obtained. Subsequently, specific primers were designed to amplify 30 overlapping fragments of approximately 1500 basepairs by PCR. Each of these PCR products was sequenced using conventional Sanger sequencing. To this end, PCR products were purified from the gel and sequenced using a BigDye Terminator v3.1 Cycle sequencing kit (Applied Biosystems, Nieuwerkerk a/d IJssel, the Netherlands) and a 3130XL genetic analyzer (Applied Biosystems), according to the instructions of the manufacturer. The nearly full-length sequence is presented in file HCoV-SA1.rtf. This sequence contains some uncertainties within the extreme 50 nucleotides of both ends. However, this information is not required to classify the coronavirus. The same figure also displays the full coding potential of HCoV-SA1. As a minimum, the HCoV-SA1 virus genome encodes the open reading frames common to the virus of the betacoronavirus genus, including orf1ab that encodes many enzymatic products, the spike surface glycoprotein (S), the non-structural genes NS3a, NS3b, NS3c, NS3d, the small envelope (E) protein, the matrix (M) protein, and the nucleocapsid (N) protein. Open reading frames are presented in files Orf1ab.rtf, S.rtf, NS3a.rtf, NS3b.rtf, NS3c.rtf, NS3d.rtf, E.rtf, M.rtf, N.rtf. Other open reading frames may be present.

### Example 5

[0217] Comparison of the Orf1ab gene product of HCoV-SA1 with those of the other members of the Betacoronavirus genus, HKU4 and HKU5 was used to test if HCoV-SA1 belongs to one of these known species or represents a new species within the genus. The International Committee on the Taxonomy of Viruses (ICTV) considers viruses that share more than 90% aa sequence identity in the conserved replicase domains to belong to the same species. This 90% identity threshold serves as the sole species demarcation criterion. Since amino acid sequence identity of Orf1ab between HCoV-SA1 and HKU4 and HKU5 is below 74% (Table 1), we conclude that HCoV-SA1 represents a novel species of the Betacoronavirus genus, although such classification requires ICTV approval.

TABLE 1
Percentage amino acid sequence identity between ORF1ab
of HCoV-SA1, HKU4 (Genbank accession numbers EF065505-EF065508)
and HKU5 (accession numbers EF065509-EF065512)

| | HCoV-SA1 | HKU4 | HKU5 |
|---|---|---|---|
| HCoV-SA1 | 100% | 72% | 74% |
| HKU4 | 72% | 99-100% | 77% |
| HKU5 | 74% | 77% | 99-100% |

[0218] The present invention in particular also relates to the spike (S) protein of a coronavirus and fragments thereof as depicted in FIGS. 16 and 17.

[0219] The present invention also relates to a member of the S9 family of human proteases known as dipeptidyl peptidase IV (DPPIV, FIG. 18), and fragments thereof.

### Protein Expression

### Example 6

[0220] A plasmid encoding HCoV EMC S1 Fc was generated by ligating a fragment encoding the S1 region (residues 1 747) into the pCAGGS expression vector as an N terminal fusion with the fragment encoding the Fc domain of human IgG (FIGS. 1 and 2). Likewise, an S1 Fc expression plasmid was made for the SARS coronavirus S1 subunit (strain Urbani: residues 1 676) and the FIPV S1 subunit (strain 79 1146; residues 1 788). S1 Fc proteins were expressed by transfection of the expression plasmids into 293T cells and affinity purified from the culture supernatant using protein A sepharose beads.

### Example 7

[0221] A plasmid encoding the ectodomain of human DPP4 (FIG. 18) was generated by ligating a fragment encoding residues 39 766 of human DPP4 into a pCD5 expression vector encoding the signal sequence of CD5 and a OneSTrEP affinity tag (IBA GmbH). Soluble DPP4 ectodomain was expressed by transfection of the expression plasmid into 293T cells and affinity purified from the culture supernatant using Streptactin sepharose beads (IBA GmbH).

### Example 8

[0222] A plasmid encoding HCoV EMC S1 Fc was generated by ligating a fragment encoding the S1 region (residues 1 747) into the pCAGGS expression vector as an N terminal fusion with the fragment encoding the Fc domain of human IgG separated by a thrombin cleavage site. Likewise, an Fc expression plasmid was made for the SARS coronavirus S1 subunit (isolate CUHK W1: residues 1 676), the FIPV S1 subunit (isolate 79 1146; residues 1 788) and the ectodomain of human ACE2 (sACE2; residues 1 614). Fc chimeric proteins were expressed by transfection of the expression plasmids into 293T cells and affinity purified from the culture supernatant using protein A sepharose beads (GE Healthcare). Purified ACE2 Fc was cleaved with thrombin and soluble ACE2 was purified by gel filtration.

### Example 9

[0223] A plasmid encoding the ectodomain of human DPP IV (sDPP IV) was generated by ligating a fragment encoding residues 39 766 of human DPP IV into a pCD5 expression vector encoding the signal sequence of CD5 and the OneSTrEP tag (IBA GmbH). Soluble DPP IV ectodomain was expressed by transfection of the expression plasmid into HEK 293T cells and affinity purified from the culture supernatant using Strep Tactin Sepharose beads (IBA GmbH).

### Pull Down; Immunoprecipitation and Detection of DPP4

### Example 10

[0224] The immunoprecipitation protocol was essentially carried out as described before with some modifications (Li et al., 2003, Nature 426:450, included herein by reference). In short, Huh 7 cells were washed twice with ice cold PBS, scraped off the plastic with a rubber policeman, pelleted and lysed in ice cold lysis buffer (0.3% DDM in PBS) containing protease inhibitors (Roche Complete Mini) at a final density of −2.5×107 cells/mL. Cell lysates were precleared with protein A sepharose beads after which 10 micrograms of probe S1 Fc was added to 1 ml of cell lysate and incubated for 1 hour at 4° C. under rotation. Precipitates were washed thrice with lysis buffer and once with PBS and subjected to NOVEX® 4 12% Tris Glycine gradient gel (Invitrogen) under reducing and non reducing conditions. A distinct 110 kDa band precipitated with EMC S1 Fc was visualized by GelCodeBlue staining, excised from the gel, incubated with trypsin and analyzed by MS. Results are shown in FIG. 20 and results of target analyses are shown in FIG. 21.

### Example 11

[0225] DPP4 cell surface expression was measured using S1 Fc proteins. Cells were washed twice with ice cold PBS, scraped off the plastic with a rubber policeman and suspended into single cells by pipetting cells up and down. S1 binding of cells was measured by incubating 2.5×105 cells with 15 μg/ml of S1 Fc followed by incubation with the fluorescent dye Alexa488 labeled goat anti human IgG antibody and analyzed by flow cytometry. Results are shown in FIG. 23.

### RNA Extraction and Quantitative RT PCR

### Example 12

[0226] RNA from 200 μl of supernatant was isolated with the Magnapure LC total nucleic acid isolation kit (Roche) external lysis protocol and eluted in 100 al. HCoV EMC RNA was quantified on the ABI prism 7700, with use of the Taqman Reverse Transcription Reagents and Taqman PCR Core Reagent kit (Applied Biosystems), using 20 μl isolated RNA, lx Taqman buffer, 5.5 mM MgCl2, 1.2 mM dNTPs, 0.25 U Amplitaq gold DNA polymerase, 0.25 U Multiscribe reverse transcriptase, 0.4 U RNAse inhibitor, 200 nM primers, and 100 nM probe. Amplification parameters were 30 minutes at 48° C., 10 minutes at 95° C., and 40 cycles of 15 seconds at 95° C., and 1 minute at 60° C. RNA dilutions isolated from a HCoV EMC stock were used as a standard. Results are shown in FIGS. 17, 24, 25 and 26.

### Example 13

[0227] HCoV EMC and SARS CoV S1 Fc proteins (2.5 μg) were mock incubated or incubated with 12.5 μg soluble DPP IV (sDPP IV) or soluble ACE2 (sACE2) in a total volume of 100 μl PBS. Precipitates were washed thrice with lysis buffer and once with PBS, and subjected to a NOVEX® 4 12% Tris Glycine gradient gel (Invitrogen) under non reducing conditions. Results are shown in FIG. 22.

### Identification of DPP4 Using Mass Spec Analysis of Peptide Fragments

### Example 14

[0228] 1D SDS PAGE gel lanes were cut into ˜1 mm slices (indicated as nr. 2 in FIG. 3) using an automatic gel slicer and subjected to in gel reduction with dithiothreitol, alkylation with chloroacetamide and digestion with trypsin (Promega, sequencing grade), essentially as described by Van den Berg et al. (Cell Stem Cell 6:369, included herein by reference). Alternatively, immunoprecipitated proteins were reduced and alkylated on beads similarly as described above. Nanoflow LC MS/MS was performed on either an 1100 series capillary LC system (Agilent Technologies) coupled to an LTQ Orbitrap XL mass spectrometer (Thermo), or an EASY nLC coupled to a Q Exactive mass spectrometer (Thermo), operating in positive mode and equipped with a nanospray source. Peptide mixtures were trapped on a ReproSil C18 reversed phase column (Dr Maisch GmbH; column dimensions 1.5 cm×100 μm, packed in house) at a flow rate of 8 al/minute. Peptide separation was performed on ReproSil C18 reversed phase column (Dr Maisch GmbH; column dimensions 15 cm×50 μm, packed in house) using a linear gradient from 0 to 80% B (A=0.1% formic acid; B=80% (v/v) acetonitrile, 0.1% formic acid) in 70 or 120 minutes and at a constant flow rate of 200 nl/minute. The column eluent was directly sprayed into the ESI source of the mass spectrometer. Mass spectra were acquired in continuum mode; fragmentation of the peptides was performed in data dependent mode by CID or HCD. Peak lists were automatically created from raw data files using the Mascot Distiller software (version 2.3; MatrixScience) or Proteome Discoverer (version 1.3; Thermo). The Mascot algorithm (version 2.2; MatrixScience, UK) was used for searching against a Uniprot database (release 2012_{—}10. fasta, taxonomy: Homo sapiens, or Macaca mulatta, or Myotis lucifugus, or Chlorocebus sabaeus, or Felis catus, included herein by reference). The peptide tolerance was set to 10 ppm and the fragment ion tolerance was set to 0.8 Da for CID spectra (LTQ Orbitrap) or to 20 mmu for HCD (Q Exactive) spectra). A maximum number of two missed cleavages by trypsin were allowed and carbamidomethylated cysteine and oxidized methionine were set as fixed and variable modifications, respectively. Results are shown in FIG. 21.

### Inhibition of HCoV EMC Replication in Huh7 Cells by Antibodies to DPP4

### Example 15

[0229] Huh7 cells were incubated with 20 μg/ml goat polyclonal antiserum against DPP4, a goat antiserum against ACE2, normal goat serum or left untreated. After 1 hour incubation, the cells were infected with HCoV EMC at a multiplicity of infection of 0.01 and left for 1 hour. Cells were washed twice and again incubated with medium containing the respective antibodies. Supernatant collected at 2 hours (open bars) and 20 hours (closed bars) was tested for presence of HcoV using a Taqman assay. Results are shown as A Ct in FIG. 25.

### Blocking of DPP4-S1 Binding by Antibodies Directed Against S1

### Example 16

[0230] Serum from a macaque infected with HCoV EMC inhibits binding of recombinant S1 to Huh7 cells. Serum at a dilution of 1:20, obtained from macaques at day 0 (blue line) and day 14 (red line) after infection with 5×107 TCID50 HCoV EMC, was preincubated for 1 hour at room temperature with 1.25 μg/ml recombinant S1 protein that was biotinylated and subsequently incubated on Huh7 cells. After treatment with FITC labeled streptavidin, cells were analyzed for fluorescence. In gray background, binding using a control biotinylated protein is shown (FIG. 26).

### Crystallization and Crystals Comprising a DPP Fragment and a Viral Protein Fragment

### Example 17

[0231] One aspect of the present invention relates to methods for forming crystals comprising fragments of DPP and viral protein as well as crystals comprising fragments of DPP and viral protein. Crystallization of DPP is essentially known from, for example, U.S. Pat. No. 7,344,852 or U.S. Patent Publication 2005/0260723 that are included herein by reference.

[0232] In one embodiment of the present invention, a method for forming crystals comprising fragments of DPPIV and viral protein is provided comprising forming a crystallization volume comprising fragments of DPPIV and viral protein, one or more precipitants, optionally a buffer, optionally a monovalent and/or divalent salt and optionally an organic solvent; and storing the crystallization volume in a container under conditions suitable for crystal formation.

[0233] In yet another embodiment, a method for forming crystals comprising fragments of DPPIV and viral protein is provided comprising forming a crystallization volume comprising fragments of DPPIV and viral protein in solution comprising PEG precipitant listed hereinbelow; and storing the crystallization volume in a container under conditions suitable for crystal formation. PEG precipitant 5 50% w/v of precipitant, wherein the precipitant comprises one or more members of the group consisting of PEG MME having a molecular weight range between 300 10000, and PEG having a molecular weight range between 100 10000 pH 5 9. Buffers that may be used include, but are not limited to, tris, bicine, cacodylate, acetate, citrate, MES and combinations thereof. Additives optionally 0.05 to 0.8 M additives wherein the additives comprises sarcosine or 0.5% to 25% additives wherein the additives comprises xylitrol; Protein Concentration 1 mg/ml 50 mg/ml; Temperature 1° C. to 25° C.

[0234] In yet another embodiment, a method for forming crystals comprising fragments of DPPIV and viral protein is provided comprising forming a crystallization volume comprising fragments of DPPIV and viral protein; introducing crystals comprising fragments of DPPIV and viral protein as nucleation sites, and storing the crystallization volume under conditions suitable for crystal formation.

[0235] Crystallization experiments may optionally be performed in volumes commonly used in the art, for example, typically 15, 10, 5, or 2 microliters or less. It is noted that the crystallization volume optionally has a volume of less than 1 microliter, optionally 500, 250, 150, 100, 50 or less nanoliters.

[0236] It is also noted that crystallization may be performed by any crystallization method including, but not limited to, batch, dialysis and vapor diffusion (e.g., sitting drop and hanging drop) methods. Micro and/or macro seeding of crystals may also be performed to facilitate crystallization.

[0237] In one variation, crystals comprising DPPIV are formed by mixing a substantially pure DPPIV fragment and a substantially pure S1 HCoV EMC fragment with an aqueous buffer containing a precipitant at a concentration just below a concentration necessary to precipitate the proteinaceous substance. One suitable precipitant for crystallizing fragments of DPPIV and viral protein is polyethylene glycol (PEG), which combines some of the characteristics of the salts and other organic precipitants (see, for example, Ward et al., J. Mol. Biol. 98:161, 1975, and McPherson, J. Biol. Chem. 251:6300, 1976.

[0238] During a crystallization experiment, water is removed by diffusion or evaporation to increase the concentration of the precipitant, thus creating precipitating conditions for the protein. In one particular variation, crystals are grown by vapor diffusion in hanging drops or sitting drops. According to these methods, a protein/precipitant solution is formed and then allowed to equilibrate in a closed container with a larger aqueous reservoir having a precipitant concentration for producing crystals. The protein/precipitant solution continues to equilibrate until crystals grow.

[0239] By performing submicroliter volume sized crystallization experiments, as detailed in U.S. Pat. No. 6,296,673, effective crystallization conditions for forming crystals of fragments of DPPIV and viral protein complex are obtained. In order to accomplish this, systematic broad screen crystallization trials are performed on a DPPIV/viral protein fragment complex using the sitting drop technique.

[0240] One skilled in the art will recognize that the crystallization conditions provided herein can be varied and still yield protein crystals comprising fragments of DPPIV and viral protein. As the conditions for the crystallization, physical and chemical factors such as a hydrogen ion concentration (pH), a kind of buffer used and a concentration thereof, a kind of a precipitant added and a concentration thereof, protein concentration, salt concentration, temperature and the like can be involved. A method for controlling and investigating the factors includes batch methods, dialysis methods, vapor diffusion methods (hanging drop method, sitting drop method and the like) and the like, described, for instance, in T. L. Blundell et al., PROTEIN CRYSTALLOGRAPHY, 59 82 (1976), published by Academic Press, or the like.

[0241] The method for crystallization includes the batch methods, dialysis methods, vapor diffusion methods and the like. By the above method, physical and chemical factors such as a hydrogen ion concentration (pH), a kind and a concentration of the buffer used, and a kind and a concentration of the precipitant used, and physical and chemical factors such as protein concentration, salt concentration and temperature can be also determined.

[0242] The hydrogen ion concentration (pH) can be adjusted with a buffer. It is desired that the buffer is a buffer having buffering action in a broad range of pH, and being capable of suppressing precipitation of a non proteinous crystal between the co existing ion in the solution used during crystallization and the precipitant or the like. The buffer includes Tris hydrochloric acid buffer, phosphate buffer, cacodylate buffer, acetate buffer, citrate buffer, glycine buffer and the like.

[0243] The precipitant may be a substance capable of elevating an effective concentration of the protein or changing a hydrogen ion concentration (pH) of the protein solution. Generally, the precipitant includes salts such as ammonium sulfate, sodium sulfate, sodium phosphate, potassium phosphate, sodium citrate, ammonium citrate, sodium chloride, potassium chloride and ammonium chloride; polyethylene glycols having various average molecular weights of about 200, about 1000, about 2000, about 4000, about 6000, about 8000, about 20000 or the like; organic solvents such as 2 methyl 2,4 pentadiol, methanol, ethanol, isopropanol, butanol and acetone, and the like.

[0244] The protein concentration may be a concentration suitable for crystallization, and it is desired that the protein concentration is, for example, 1 to 50 mg/ml, preferably 5 to 20 mg/ml, more preferably 7 to 15 mg/ml.

[0245] It is desired that the temperature conditions are 3° C. to 25° C., preferably 12° C. to 22° C.

[0246] In the case where the crystallization is carried out by the batch method, the crystallization can be carried out by gradually adding a precipitant solution comprising a precipitant, buffer and the like, so as to form a layer on the top layer of the solution containing the dipeptidyl peptidase to give a mixture, or by gradually adding the solution comprising the DPPIV/viral protein fragment complex, so that the solution is an upper layer of the precipitant solution to give a mixture. Here, the mixture is allowed to stand in a tightly closed vessel or container. In the case where the crystallization is carried out by the dialysis method, the crystallization can be carried out by placing a solution comprising DPPIV/viral protein fragment complex in a size exclusion semi permeable membrane, and placing a precipitant solution outside of the size exclusion semi permeable membrane as a reservoir solution, thereby diffusing the reservoir solution to the solution comprising the DPPIV/viral protein fragment complex via the semi permeable membrane.

[0247] In the case where the crystallization is carried out by the hanging drop method in the vapor diffusion method, the crystallization can be carried out by placing a mixed solution of a solution comprising the DPPIV/viral protein fragment complex and a precipitant solution in a closed vessel allowing to be hanged at a position above the upper space of a reservoir in which the precipitant solution is contained as a reservoir solution, wherein the vapor pressure of the reservoir solution in the reservoir is set to be lower than that of the mixed solution.

[0248] In the case where the crystallization is carried out by the sitting drop method in the vapor diffusion method, the crystallization can be carried out by placing a mixed solution comprising a solution comprising the DPPIV/viral protein fragment complex and a precipitant solution in a closed vessel at a position higher than the liquid surface of a reservoir in which the precipitant solution is contained as a reservoir solution, wherein the vapor pressure of the reservoir solution in the reservoir is set to be lower than that of the mixed solution.

[0249] The crystallization can be carried out by the sitting drop method from the viewpoint of obtaining excellent quality and large crystals.

[0250] Crystals comprising fragments of DPPIV and viral protein have a wide range of uses. Such crystals may, for example, be used to perform X ray or neutron diffraction analysis in order to determine the three dimensional structure of fragments of DPPIV and viral protein and, in particular, to assist in the identification of its active site where fragments may bind. Knowledge of the binding site region allows rational design and construction of ligands including inhibitors. Crystallization and structural determination of fragments of DPPIV mutants and/or viral protein mutants having altered bioactivity allows the evaluation of whether such changes are caused by general structure deformation or by side chain alterations at the substitution site.

### Example 18

[0251] Because DPPIV protein levels may not always accurately reflect the levels of active DPPIV enzyme, it may be useful to measure DPPIV enzymatic activity in proteinaceous substances instead. Use of a test system that is tested for DPPIV assay in proteinaceous substances as diverse as plasma, serum, urine, saliva, tissue, live cells and cell extracts, and exudates is recommended. Such a test system may be the DPPIV/CD26 Activity Assay for Biological Samples provided by ENZO® life sciences (on the World Wide Web at enzolifesciences.com). A known DPPIV inhibitor, such as P32/98 (Ki=130 nM) is preferably included for use as a control.

### Example 19

[0252] To examine if cytokines decrease susceptibility to HCoV EMC infection through an effect on cell surface DPP4 expression, we analyzed DPP4 expression after treatment with different cytokines.

[0253] All treatments were done in quadruplets (96 well experiments) or triplicate (6 well and 24 well experiments). Cell cultures were grown for 24 to 48 hours and then changed to medium containing 1% newborn calf serum, and treated with recombinant human (r hu) IL 4 (BD Pharmingen), r hu IFN y, r hu TNF a, r hu IL 13, r hu IL 10, r hu IL 1, r hu TGF beta (Peprotech Inc.) and r hu IFN a (Roche) at a concentration of 10 ng/ml, 48 hours before infection for a further evaluation of changes in DPPIV surface protein expression and changes in susceptibility to HCoV EMC infection. In a first experiment, r hu TGF beta down regulates DPP4 expression and reduces the cells' susceptibility to virus infection and reduces virus replication.

### Example 20

[0254] To examine if a compound decreases susceptibility to HCoV EMC infection through an effect on cell surface DPP4 expression, we analyze DPP4 expression after treatment with different compounds. Huh 7 cells are grown in Dulbecco's modified Eagle's medium (DMEM), supplemented with 10% fetal bovine serum (FBS), sodium bicarbonate and 20 mM HEPES buffer. All treatments are done in quadruplets (96 well experiments) or triplicate (6 well and 24 well experiments). Cultures are grown for 24 to 48 hours and then changed to medium containing 1% newborn calf serum, and treated with compound, i.e., adenosine (300 μM) or control vehicle for a further 48 hour evaluation of changes in DPPIV surface protein expression and changes in susceptibility to HCoV EMC infection. In a first experiment, adenosine down regulates DPP4 expression and reduces the cells' susceptibility to virus infection and reduces virus replication.

[0255] In a second experiment, inhibition of HCoV EMC replication in Huh7 cells by soluble adenosine deaminase (ADA) was demonstrated where inhibition with ACE2 was negative. Huh7 cells were incubated with different concentrations of recombinant soluble ADA or recombinant soluble ACE2. After 1 hour incubation, the cells were infected with HCoV EMC at a multiplicity of infection of 0.01. After 8 hours, cells were fixed and stained with a rabbit antiserum against HCoV EMC nsp4 and cells were counted. Results are shown as number of infected cells per well. Infection of Huh7 cells is inhibited by recombinant soluble ADA but not by recombinant soluble ACE2. The results are shown in FIG. 27.

[0256] In a third experiment, inhibition of HCoV EMC replication in Huh7 cells by soluble DPP4 was demonstrated. Different concentrations of recombinant soluble DPP4 or recombinant soluble ACE2 were incubated with HCoV EMC for 1 hour at 37° C. and used to infect Huh7 cells. After 8 hours, cells were fixed and stained with a rabbit antiserum against HCoV EMC nsp4 and cells were counted. Results are shown as number of infected cells per well. Infection of Huh7 cells is inhibited by recombinant soluble DPP4 but not by recombinant soluble ACE2. The results are shown in FIG. 28.

### Example 21

[0257] The spike (S) protein of the recently emerged human coronavirus (MERS CoV) mediates infection by binding to the cellular receptor dipeptidyl peptidase 4 (DPP4). Here, we mapped the receptor binding domain in the S protein to a 231 amino acid fragment (residues 358 588) by evaluating the interaction of spike truncation variants with receptor expressing cells and soluble DPP4.

[0258] Antibodies to this domain much less so to the preceding N terminal region efficiently neutralize MERS CoV infection. It is herein now also shown by co immunoprecipitation and FACS analyses that an internal region of the S1 of hCoV EMC consisting of 231 amino acids is sufficient to bind its receptor, DPP4. It was also shown that the region elicits the most neutralizing antibodies against the virus. Those results identified the receptor binding region of the S protein by convincing methods and the region contains major neuralization epitopes.

[0259] Additionally, the inventors herein further map the receptor binding domain (RBD) in the spike protein of the novel coronavirus EMC (hCoV EMC, now MERS CoV). Based on data obtained with bioinformatic tools they designed truncation variants of the S1 portion of hCoV EMC S (EMC S) and showed that the S1 variant harboring residues 358 588 i) co purifies with recombinant CD26 (the hCoV EMC receptor), binds to cellular CD26 in a FACS based assay and elicits neutralizing antibodies in immunized rabbits with higher efficiency than the wt S1 subunit.

[0260] Just 10 years following the outbreak of the severe respiratory acute syndrome coronavirus (SARS CoV), the world is confronted with yet another deadly human coronavirus. The virus, first provisionally called human coronavirus EMC (hCoV EMC) but now named MERS CoV, referring to its emergence in the Middle East and to the respiratory syndrome it causes, belongs to the betacoronavirus genus lineage 2c. It has thus far been identified in over 50 patients from or linked to the Arabian Peninsula, approximately half of them being fatal. Like with SARS CoV, patients affected by MERS CoV suffer from severe and often lethal lower respiratory tract infection. The epidemiology of MERS CoV is still enigmatic, but the geographical distribution of epidemiologically unlinked individuals points to intermittent, zoonotic transmission from a—so far unknown animal source, whereas a number of reported clusters indicate limited human to human spread.

[0261] The main determinant of coronavirus tropism is the viral spike (S) protein as it mediates binding to a cell surface receptor. The MERS CoV S protein, a 1353 amino acid type I membrane glycoprotein, assembles into trimers that constitute the spikes or peplomers on the surface of the enveloped coronavirus particle. The protein combines the two essential entry functions, namely that of host receptor binding and membrane fusion, which are attributed to the N terminal (S1, residues 1 751) and C terminal (S2, residues 752 1353) half of the S protein, respectively. Recently, we have identified dipeptidyl peptidase 4 (DPP4, also known as CD26), expressed in the human lung, as a functional receptor for MERS CoV. Importantly, MERS CoV can also use the evolutionary conserved DPP4 of other species, most notably that of bats.

[0262] Coronaviruses bind to receptors via independently folded, generally about 150 300 residues long, receptor binding domains (RBD) present in their S1 subunit, of which the location within S1 can vary. Thus, for the betacoronavirus mouse hepatitis virus (MHV), the binding to its CEACAM receptor has been mapped to the N terminal ˜300 amino acids of the spike protein whereas for the SARS CoV of the same genus binding to the ACE2 receptor maps to residues 323 502 of S1. Identification of the RBD can hence help the development of monoclonal antibodies and vaccines for the treatment and prevention of infection. The RBD is the most important target for neutralizing antibodies preventing virus receptor interaction.

[0263] We previously used the S1 domain of MERS CoV fused to the Fc region of human IgG to demonstrate the interaction of S1 with DPP4 expressing cells and with soluble, i.e., non membrane anchored DPP4. To identify the receptor binding domain in the MERS CoV S1 subunit, we generated S1 Fc protein chimeras with truncations at the C terminus and N terminus of the S1 domain. We considered a three domain structure of the MERS CoV S1 protein (residues 1 357, 358 588 and 589 747) based on the predicted location and structure of the RBD of two other betacoronaviruses, MHV and SARS CoV, of which the homologous regions for MERS CoV S map to the residues 18 351 and 379 580, respectively. In addition, a soluble form of human DPP4 (residues 39 766) was made, which was C terminally tagged with the Fc region. These proteins were expressed in HEK 293T cells after transfection of the expression plasmids and subsequently affinity purified from the cell culture supernatant using protein A sepharose beads as described. The Fc region of purified sDPP4 Fc was proteolytically removed using trypsin (data not shown). First, we analyzed the S1 Fc proteins and C terminal Si truncations thereof for their ability to interact with sDPP4 using a co purification assay. sDPP4 was efficiently co purified by the S1 Fc variants encompassing residues 1 588 and 1 747, whereas the 1 357 S1 Fc variant was unable to bind sDPP4. We next generated an S1 Fc variant comprising residues 358 588, a region homologous to the ACE2 receptor binding domain in SARS CoV S1. This S1 Fc truncation variant efficiently bound soluble DPP4, indicating that the DPP4 receptor binding domain is located within the 358 588 residues domain of the MERS CoV spike protein.

[0264] We subsequently tested the ability of these S1 Fc variants to bind to HEK 293T cells transiently expressing DPP4 by using flow cytometry. The S1 Fc variants encompassing residues 1 588 and 358 588 bound to DPP4 expressing HEK 293T cells with efficiencies comparable to the full length S1 protein, whereas no binding was observed with the 1 357 S1 Fc variant. These data show the 358 588 amino acids S1 region to be essential and sufficient for binding to DPP4 expressing cells, consistent with the results of the sDPP4 interaction study.

[0265] Finally polyclonal antibodies were raised in rabbits against the 1 747, 1 357 and 358 588 S1 Fc variants (Davids Biotechnology GmbH, Germany). The sera, which displayed equal ELISA titers towards its antigen (1:300,000, data not shown), were tested for their ability to neutralize virus infectivity. Antibodies raised against the 358 588 S1 Fc variant efficiently neutralized virus infectivity, superior to those raised against the 1 747 and 1 357 S1 Fc variants. This indicates that neutralizing epitopes within S1 are primarily localized to the RBD region. The elicited antibodies are likely to block the interaction of the spike protein with DPP4 thereby neutralizing MERS CoV infectivity. The results demonstrate the preferred potential of S1 protein and of the 358 588 S1 polypeptide or functional fragments thereof reactive with the MERS CoV neutralizing antibody for use as subunit vaccines with a high biosafety profile compared to vaccines based on inactivated viruses or live attenuated virus.

[0266] Except for the betacoronavirus MHV, which binds to its CEACAM receptor through a domain in the N terminal part of its S1 protein, the RBDs of all other coronaviruses that engage protein receptors and that have been mapped occur in the C terminal portion of the S1 subunit. Examples also include the alphacoronaviruses binding to ACE2 (hCoV NL63) and APN (e.g., TGEV, hCoV 229E). In this study, we have experimentally mapped the RBD of MERS CoV to a 231 amino acid fragment (residues 358 588) within the spike protein. This domain nicely corresponds with the S1 region recently anticipated to interact with the DPP4 receptor on the basis of theoretical S1 structure predictions. The RBD in the MERS CoV S1 protein localizes in the same region where the SARS CoV S protein interacts with its ACE2 receptor. The SARS CoV RBD structure displays a five stranded β sheet core structure (β1 4 and β7) maintaining the overall domain conformation, and a long extended loop containing two anti parallel β sheets (β5 and β6) responsible for receptor binding{{ }}. Intriguingly, compared to SARS CoV, the RBD of MERS CoV contains a relatively conserved core domain but a highly variable loop region, tentatively explaining the differential receptor usage. Crystallization and structure analysis of this MERS CoV RBD region in complex with DPP4 will give detailed insight into the virus receptor binding interface.

### Example 22

### Dipeptidyl Peptidase 4 Receptor Determinants of Respiratory MERS-Coronavirus Infection

[0267] Here we show that MERS coronavirus (MERS-CoV) replicates in cells of different species using dipeptidyl peptidase 4 (DPP4) as a functional receptor. This suggests a broad host species tropism allowing zoonotic transmission from many animal species. Here we show contrasting DPP4 receptor functionality in different animal species. Resistance of ferrets to MERS-CoV infection was due to the inability to bind MERS-CoV as a result of amino acid variation in the ferret DPP4 β-propeller region. In contrast, DPP4 expressing respiratory epithelial cells in the lower—but not upper—respiratory tract of cynomolgus macaques were targeted by MERS-CoV, which resulted in relatively mild disease. Variable DPP4 expression and adenosine deaminase (ADA)—shown to act as a natural antagonist for MERS-CoV infection—may potentially modulate MERS-CoV infection. Our findings illuminate the role of DPP4 sequence and expression variability in host range restriction and outcome of respiratory MERS-CoV infection and lead us to conclude that MERS-CoV receptor sequence and expression variability determine host range restriction of lower respiratory MERS-CoV infection.

[0268] Coronaviruses (CoVs) usually cause common colds in humans but zoonotic transmission occasionally introduces more pathogenic viruses into the human population as was demonstrated by the severe acute respiratory syndrome (SARS) outbreak. In 2012 a previously unknown human coronavirus (CoV), now named Middle East respiratory syndrome CoV (MERS-CoV), was isolated from the sputum of a 60-year-old man in Saudi Arabia who presented with acute pneumonia with a fatal outcome. To date, several infection clusters have been reported over a one-year period with around 50% of the reported human cases being fatal. Although limited human-to-human transmission has been observed, it is feared that by acquiring additional mutations MERS-CoV may spread more easily.

[0269] MERS-CoV represents a novel betacoronavirus species with the closest known relatives being clade 2c bat CoVs, detected in diverse species of bats but not yet in any animal species from the Arabian Peninsula. Although MERS-CoV replicates in cells of different species including bats, pigs and (non-) human primates, its ability to infect different animal species may be restricted given the fact that hamsters were shown to resist MERS-CoV infection. Therefore, a further understanding of factors that determine host restriction and viral transmission need to be revealed by studies in different animal species.

[0270] Herein we identified dipeptidyl peptidase 4 (DPP4) as a functional MERS-CoV receptor in human and bat cells. To further analyse DPP4 usage by MERS-CoV in vivo, ferrets (n=4), known to be susceptible to several respiratory viruses including SARS-CoV and influenza viruses, were inoculated intratracheally with MERS-CoV. The animals did not seroconvert and only low levels of virus were detected by RT-qPCR in respiratory swabs at 1-2 days post infection (dpi). In vitro, ferret primary kidney cells could not be infected with MERS-CoV despite DPP4 surface expression, while transfection of these cells with human DPP4 (hDPP4) rendered the cells susceptible, suggesting that ferret DPP4 (fDPP4) does not efficiently bind MERS-CoV. Consistently, MDCK cells transfected with fDPP4 did not bind to synthetic MERS-CoV spike (S1) protein and were not infected by the virus (FIG. 33B,C). DPP4 is an ectoenzyme that cleaves dipeptides from hormones, chemokines and cytokines by its conserved C-terminal ca-hydrolase domain of the protein, while its N-terminal eight-blade β-propeller domain contains more sequence variability. By constructing DPP4 chimeras we observed that the blades 4 and 5 containing hDPP4 domain (residues 246-505) could confer to ferret DPP4 the ability to bind to S1 and to mediate MERS-CoV infection when expressed in non-susceptible cells (FIG. 33B,C). A Quick Change site-directed mutagenesis kit (Stratagene) was used to construct different hDPP4 point mutants. The presence of the correct mutations and absence of undesired mutations was confirmed by sequencing analysis. Plasmids were transfected into MDCK cells in triplicate, after 24 h incubation individual wells were split to determine DPP4 cell surface expression, S1-binding and susceptibility to MERS-CoV infection on the same transfected cell culture. Consistently, substitution of selected solvent exposed residues present in blades 4 and 5 of hDPP4 by those occurring at these positions in fDPP4, abrogated DPP4's capacity to bind to S1 and to mediate MERS-CoV cell susceptibility upon transfection, suggesting that these residues are involved in MERS-CoV binding and entry (FIG. 33D,E). Reciprocal substitutions of these amino acids in fDPP4 however, did not confer S1 binding, demonstrating the complexity of the interaction in the face the highly polymorphic nature of these two blades. The identified residues also are critical in binding the human enzyme adenosine deaminase (ADA), a natural DPP4 ligand that is involved in the development and maintenance of the immune system. Using recombinant ADA, significant inhibition of MERS-CoV infection and spike protein binding was demonstrated revealing a natural occurring antagonist able to block MERS-CoV infection. The data on the co-crystallization of the receptor binding domain of S1 and DPP4 are in line with the data presented. Phylogenetic analysis of the virus binding region of DPP4 indicated that human, macaque, horse and rabbit DPP4 cluster together as do DPP4's from cattle, pig and bats, that are somewhat more distantly related. Small animals including ferret, mice and most likely hamsters, shown to resist MERS-CoV infection, are more divergent in the DPP4 virus binding region, which at least in the case of ferrets has consequences for MERS-CoV binding.

[0271] Considering the highly conserved virus binding region in macaque DPP4 as compared to hDPP4, we first confirmed the use of cynomolgus macaque DPP4 as a functional MERS-CoV receptor. DPP4 antibodies blocked MERS-CoV infection of macaque primary kidney cells in vitro. Besides macaques, rabbits may be a potential animal model for MERS-CoV infection; ex vivo inoculation of rabbit lung and kidney tissues revealed susceptibility to MERS-CoV. We subsequently inoculated ten young adult cynomolgus macaques intratracheally with MERS-CoV and euthanized them at 1 (n=4, macaques 1-4), 4 (n=4, macaques 5-8) and 28 dpi (n=2, macaques 9 and 10). All animals remained free of severe clinical signs and maintained a rhythmic pattern of body temperatures fluctuating between 35° C. (night) and 39° C. (day) that seemed slightly elevated after inoculation. Neutralizing antibodies with titers 40-80 were detected in the two MERS-CoV infected macaques that were euthanized at 28 dpi. Upon necropsy, there were a few mild focal red-grey slightly depressed areas affecting less than 5% of the lung tissue, although one lobe of macaque 7 had a dark red rim with evidence of suppurative bronchopneumonia, consistent with the detection of Escherichia coli bacteria in this lobe. MERS-CoV mRNA was detected at highly variable levels in pharyngeal and nasal swabs on 1 to 11 dpi and at low levels in rectal swabs on 2 and 3 dpi. In addition, MERS-CoV was detected by RT-qPCR in the lungs, nasal septum, serum and spleen and in one animal—macaque 1—also in the kidney, liver, colon and urine at 1 dpi. Infectious virus was detected only in one pharyngeal swab sample and to a limited extent in the lungs. Using a probe that targets the MERS-CoV nucleocapsid gene, hybridization was observed in epithelial cells in bronchioles, and in moderate numbers of type 2 and few type 1 pneumocyte-resembling cells in the alveoli at 1 dpi while at 4 dpi very few cells were found positive. Consistent with activation of cytokines like CCL3, the lungs showed mild alveolitis, characterized by thickening of the alveolar septa with infiltration of few neutrophils and macrophages and moderate type 2 hypertrophy and hyperplasia at 4 dpi. In the alveolar lumina there were increased numbers of alveolar macrophages and occasionally small amounts of edematous fluid with fibrin and few neutrophils. Consistent with the capacity of the virus to induce syncytia in vitro, syncytial cells were seen. By applying a technique that enables successive staining of the same tissue section, tropism of MERS-CoV for cells expressing DPP4 in vivo was demonstrated. Thus, the experimental infection of young adult macaques with MERS-CoV revealed that macaque DPP4 positive cells in the lower respiratory tract can be infected with MERS-CoV but the associated pathological changes are relatively mild, indicating that young adult macaques are at best a suboptimal MERS-CoV animal model for the often fatal MERS-CoV infection in humans.

[0272] Abundant ACE2 expression in the respiratory tract has been suggested to facilitate rapid spread of SARS-CoV, a critical factor in the rapid induction of innate immune responses that drive the acute respiratory distress syndrome. In non-infected macaques DPP4 expression was restricted to non-ciliated cells, type 2 cells and endothelial cells whereas no staining was observed in ciliated epithelial cells of the (upper) respiratory tract. The absence of DPP4 on the upper respiratory tract epithelial cells, consistent with the inability to detect viral antigen in these cells, therefore may limit efficient virus transmission through the upper respiratory route. Kidneys, liver, intestine, and sub mucosal glands of the upper respiratory tract were found to contain varying levels of DPP4, which mainly localized to the apical side of the cells. Enhanced DPP4 expression was observed in the lungs of the bacterial co-infected macaque 7, which excreted infectious virus in the pharyngeal swab and displayed a higher body temperature. We observed that LPS stimulation of in vitro differentiated macrophages enhanced DPP4 expression. Attempts to infect these cells were unsuccessful, likely due to ADA production by these cells. Interestingly, DPP4 was virtually absent in the lower respiratory tract epithelium of ferrets but could be visualized in the kidneys of these animals. Contrastingly, relatively strong DPP4 expression was observed on different cell types in human lungs, including a MERS-CoV infected individual. In several pathological conditions such as viral infections and type 2 diabetes increased levels of (soluble) DPP4 have been demonstrated. Thus, relatively low levels of DPP4 expression in the lungs of young adult macaques could partly explain the mild infection observed after MERS-CoV infection but further studies need to reveal the role of varying DPP4 and ADA expression levels in regulating MERS-CoV replication in vivo.

[0273] Our findings demonstrate that the host range potential of the emerging novel human MERS-CoV is primarily determined by the MERS-CoV binding to and tissue distribution of DPP4. The co-localisation of DPP4 with MERS-CoV in the lower respiratory tract of MERS-CoV infected non-human primates (in bronchioles and alveoli), and the inability to infect ferrets further supports the sole involvement of DPP4 as a functional receptor in MERS-CoV entry. Variable levels of DPP4 expression in the lower respiratory tract may impose MERS-CoV host range restriction and explain why studies in rhesus macaques have not been successful to reproduce the severe disease seen in humans. Future studies need to unravel the significance of variable DPP4 expression in MERS-CoV patients, for example as a result of co morbidities like microbial infections, type 2 diabetes or aging.

[0274] Material and Methods

[0275] Cloning of Human and Ferret DPP4.

[0276] The hDPP4 cDNA was obtained as described. Total RNA was isolated from ferret primary kidney cells using RNeasy mini kit (Qiagen) and cDNAs were synthesized by using the Superscript reverse transcriptase (Life Technologies). The complete DPP4 genes were amplified using Pfu Ultra II fusion HS DNA polymerase (Stratagene) and cloned into the pcDNA 3.1 expression vector (Life Technologies). Human to ferret DPP4 mutants of cDNA constructs were made by utilizing unique restriction enzyme sites shared by human and ferret DPP4. Pst I can cut human and ferret DPP4 into three fragments (human, amino acid 1-246, 247-504 and 505-766 and ferret, amino acid 1-245, 246-503 and 504-765). The middle fragment of human and ferret DPP4 was exchanged between human and ferret, the final plasmid constructs contained different combinations of fragments: human-ferret-human (HFH) or ferret-human-ferret (FHF). A Quick Change site-directed mutagenesis kit (Stratagene) was used to construct different hDPP4 point mutants. The presence of the correct mutations and absence of undesired mutations was confirmed by sequencing analysis. Plasmids were transfected into MDCK cells in triplicate, after 24 h incubation individual wells were split to determine DPP4 cell surface expression, S1-binding and susceptibility to MERS-CoV infection on the same transfected cell culture. S1 binding and infection were corrected for DPP4 cell surface expression as determined by the goat polyclonal antiserum against DPP4 (R&D systems), a secondary FITC conjugated rabbit anti goat serum followed by FACS analysis.

[0277] Phylogenetic Analysis of DPP4.

[0278] Sequence alignment was performed by using ClustalW in the MEGA5.0 software package (www.megasoftware.net), and the trees were constructed by using the neighbor-joining method with p-distance (gap/missing data treatment; complete deletion) and 1,000 bootstrap replicates as in MEGA version 5.0.

[0279] Protein Expression and S1 Binding Assay.

[0280] A plasmid encoding MERS-CoV S1-Fc was generated by ligating a fragment encoding the S1 domain (residues 1-747) 3′-terminally to a fragment encoding the Fc domain of human IgG into the pCAGGS expression vector. Likewise, an S1-Fc expression plasmid was made the FIPV S1 domain (isolate 79-1146; residues 1-788). Fc chimeric proteins were expressed by transfection of the expression plasmids into HEK-293T cells and affinity purified from the culture supernatant using Protein A Sepharose beads (GE Healthcare). S1 binding of cells was measured by incubating 105 cells with 15 mg/ml of S1-Fc followed by incubation with FITC or DyLight-488-labelled goat-anti-human IgG antibody and analysis by flow cytometry.

[0281] Virus Infection Experiments.

[0282] Virus stocks of MERS-CoV (EMC isolate) were prepared. Transfected COS-7 cells, Huh-7 and primary ferret and macaque kidney cells were inoculated with MERS-CoV for 1 h with high MOI. After washing the cells were incubated with medium containing 1% fetal bovine serum. Alternatively we used thin cut slices from the lungs and kidneys of rabbits that were incubated in culture medium with virus for 24 h. At 8 or 24 h after infection cells were fixed with formaldehyde and stained using rabbit-anti-SARS-CoV NSP4 antibodies that are cross-reactive for hCoV-EMC, according to standard protocols using a FITC conjugated swine-anti-rabbit antibody as a second step. Primary ferret or macaque kidney cells were preincubated with antibodies to DPP4 (polyclonal goat-anti DPP4 immunoglobulin, R&D systems) at 20 μg/ml to block MERS-CoV infection. Recombinant human ADA (R&D systems) was preincubated with hDPP4 transfected cells or Huh7 cells for 1 h after which the cells were infected with MERS-CoV for 8 h and processed.

[0283] Animal Studies.

[0284] Ten cynomolgus macaques (Macaca fascicularis), 3-5 years old with active temperature transponders in the peritoneal cavity (n=3), were inoculated with 5×106 TCID50 of MERS-CoV via the intranasal and intratracheal route. In addition, four ferrets (Mustello fuoris) were inoculated with 1×106 TCID50 of MERS-CoV via the intranasal and intratracheal route. Animals were checked daily for clinical signs. Just before infection and at different dpi, animals were anesthetized with ketamine and nasal, pharyngeal, and rectal swabs were taken, which were placed in 1 ml Dulbecco's modified Eagle's medium supplemented with 100 IU penicillin/ml and 100 □g of streptomycin/ml (virus transport medium) and frozen at −70° C. until RT-PCR analysis. The animals were euthanized at different days (Day 1, 4 or 28) p.i. by exsanguination under ketamine anesthesia. Approval for animal experiments was obtained from the Institutional Animal Welfare Committee (nr EMC 2808).

[0285] Necropsies were performed according to a standard protocol. For semi-quantitative assessment of gross pathology, the percentage of affected lung tissue from each lung lobe was determined at necropsy, recorded on a schematic diagram of the lung and the area of affected lung tissue was subsequently calculated (gross pathology score). One lung of each monkey was inflated with 10% neutral-buffered formalin by intrabronchial intubation and suspended in 10% neutral-buffered formalin overnight. Samples were collected in a standard manner (from the cranial, medial and caudal parts of the lung), embedded in paraffin, cut at 3 Om and used for immunohistochemistry (see below) or stained with hematoxylin and eosin (H&E). The lung, liver, spleen, kidney, intestine, trachea, and tracheobronchial lymphnode H&E sections were examined by light microscopy.

[0286] In Situ Hybridization.

[0287] The ISH probes targeting the nucleocapsid gene of MERS-CoV were designed by Advanced Cell Diagnostics (Hayward, Calif.) and ISH was performed according to the manufacturer's instructions and ISH staining was visualized using substrate Fast Red (pink). Controls included probes against SARS-CoV nucleocapsid protein and tissues from non infected animals.

[0288] Immunohistochemistry.

[0289] Family consent was granted for limited postmortem tissue retrieval from a MERS-CoV patient in the UK, consisting of a 20-cm-long midline incision in lower chest and upper abdomen, from which tissue samples were collected from both lungs. Archival paraffin-embedded human tissue sections were obtained from the Department of Pathology, Erasmus M C. Four historic macaque controls were used as mock (PBS) infected. For histological analysis, samples were placed in 10% neutral-buffered formalin and further processed for routine immunohistochemistry. Serial 3 μm lung sections were stained using according to standard protocols using antibodies to DPP4 (polyclonal goat-anti DPP4 immunoglobulin, R&D systems. For phenotyping to test DDP4 expression of MERS-CoV infected cells, we used a destaining-restaining technique. Briefly, the precipitate used for visualization of MERS-CoV antigen staining was dissolved in graded 100%-70% alcohols. To detach the primary antibody and red immunohistochemistry signals, slides were soaked in eluding buffer (5 ml 0.1M HCl, 95 ml 0.1M NaCl containing 1M glycine) for 2 hours. The sections were treated with two 5 min intervals heating in citric acid buffer pH 6.0 to denature any undetached primary antibody. The slides were then incubated with antibodies against DPP4 in PBS/0.1% BSA for 1 hour at RT. After washing, sections were incubated with horseradishperoxidase labeled anti-goat IgG 1/100 in PBS/0.1% BSA for 1 hour at RT. Peroxidase activity was revealed by incubating slides in 3,3′-diaminobenzidine-tetrachlorhydrate (DAB) (Sigma) for 3-5 minutes, resulting in a brown precipitate, followed by counterstaining with hematoxylin.

[0290] RNA-Extraction and Quantitative RT-PCR.

[0291] Samples were analysed with the upE PCR and confirmed by a nucleocapsid specific PCR. RNA from 200 □1 of culture supernatant was isolated with the Magnapure LC total nucleic acid isolation kit (Roche) and eluted in 100 □1. MERS-CoV RNA was quantified on the ABI prism 7700, with the TaqMan® Fast Virus 1-Step Master Mix (Applied Biosystems) using 20 □1 isolated RNA, 1× Taqman mix, 0.5 U uracil-N-glycosylase, 45 pmol forward primer (5′-GGGTGTACCTCTTAATGCCAATTC-3′), 45 pmol reverse primer (5′-TCTGTCCTGTCTCCGCCAAT-3′) and 5 pmol probe (5′-FAM-ACCCCTGCGCAAAATGCTGGG-BHQ1-3′). Amplification parameters were 5 min at 50° C., 20 sec at 95° C., and 45 cycles of 3 s at 95° C., and 30 sec at 60° C. RNA dilutions isolated from an MERS-CoV stock were used as a standard.

[0292] Lung tissue samples (0.3-0.5 gram) were taken for RT-PCR and microarray analysis in RNA-later (Ambion, Inc.). RNA was isolated from homogenized post mortem tissue samples using Trizol Reagent (Invitrogen) and the RNeasy mini kit (Qiagen). cDNA synthesis was performed with ˜1 □g total RNA and Superscript III RT (Invitrogen) with oligo(dT), according to the manufacturer's instructions. Semi-quantitative RT-PCR was performed as described previously to detect MERS-CoV and to validate cellular gene expression changes as detected with microarrays of CCL3 (Applied Biosystems). Differences in gene expression are represented as the fold change in gene expression relative to a calibrator and normalized to a reference. GAPDH (glyceraldehydes-3-phosphate dehydrogenase) was used as endogenous control to normalize quantification of the target gene. The samples from the mock-infected macaques were used as a calibrator. Average results (□ s.e.m.) for groups were expressed as fold change compared to PBS-infected animals.

[0293] Macrophage Cultures.

[0294] Monocytes isolated from peripheral blood mononuclear cells were cultured with GM-CSF for 5 days to generate macrophages. Subsequently cells were stimulated with LPS at 1 μg/ml for 24 h and processed for DPP4 staining and FACS analysis.

[0295] Statistical Analysis.

[0296] Data were compared using one way ANOVA with post-test Bonferroni. Statistical analysis was performed with Prism 4.0 (Graphpad).

### REFERENCES TO EXAMPLE 22

[0297] 1. J. S. Peiris, Y. Guan, K. Y. Yuen, Nat. Med. 10, S88-97 (2004).
[0298] 2. A. M. Zaki, S. van Boheemen, T. M. Bestebroer, A. D. Osterhaus, R. A. Fouchier, N. Engl. J. Med. 367, 1814-1820 (2012).
[0299] 3. S. van Boheemen et al., MBio 3, 00473-12 (2012).
[0300] 4. World Health Organisation. Middle East respiratory syndrome coronavirus (MERS-CoV)-update, http://www.who.int/csr/don/2013_{—}08_{—}01/en/index.html (8 Aug. 2013).
[0301] 5. A. Assiri et al., N. Engl. J. Med. 369, 407-416 (2013).
[0302] 6. B. Guery et al., Lancet 381, 2265-2272 (2013).
[0303] 7. C. B. Reusken et al., Vector Borne Zoonotic Dis 10, 785-791 (2010).
[0304] 8. A. Annan et al., Emerg Infect Dis 19, 456-459 (2013).
[0305] 9. M. A. Muller et al., MBio 3, 00515-12 (2012).
[0306] 10. J. F. Chan et al., J. Infect. Dis. 207, 1743-1752 (2013).
[0307] 11. E. de Wit et al., PLoS One 8, e69127 (2013).
[0308] 12. V. S. Raj et al., Nature 495, 251-254 (2013).
[0309] 13. B. E. Martina et al., Nature 425, 915 (2003).
[0310] 14. J. A. Belser, J. M. Katz, T. M. Tumpey, Dis. Model. Mech. 4, 575-579 (2011).
[0311] 15. E. Boonacker, C. J. Van Noorden, Eur. J. Cell. Biol. 82, 53-73 (2003).
[0312] 16. W. A. Weihofen, J. Liu, W. Reutter, W. Saenger, H. Fan, J. Biol. Chem. 279, 43330-43335 (2004).
[0313] 17 R. P. Dong et al, J. Immunol. 156, 1349-1355 (1996).
[0314] 18. G. Lu et al., Nature doi:nature12328 (2013).
[0315] 19. N. Wang et al., Cell. Res. doi:cr201392 (2013).
[0316] 20. B. Rockx et al., J. Virol. 83, 7062-7074 (2009).
[0317] 21. S. L. Smits et al., PLoS Pathog. 6, e1000756 (2010).
[0318] 22. J. Zhong et al., Diabetes 62, 149-157 (2013).
[0319] 23. B. A. Conlon, W. R. Law, Clin. Exp. Immunol. 138, 14-20 (2004).
[0320] 24. S. A. Lee et al., J. Clin. Endocrinol. Metab. 98, 2553-2561 (2013).
[0321] 25. T. Andrieu et al., J. Clin. Virol. 27, 59-68 (2003).
[0322] 26. V. J. Munster, E. de Wit, H. Feldmann, N. Engl. J. Med. 368, 1560-1562 (2013).
[0323] 27. S. L. Smits et al., J. Virol. 85, 4234-4245 (2011).
[0324] 28. V. M. Corman et al., Euro. Surveil.l 17, pii: 20334 (2012).

1. A mammalian positive-sense single stranded RNA virus classifiable as belonging to the Order: Nidovirales; Family: Coronaviridae; Subfamily: Coronavirinae; Genus: Betacoronavirus; and non-Lineage A, non-Lineage B or non-Lineage D, human betacoronavirus.

2. The virus according to claim 1 having a receptor binding domain capable of binding to a dipeptidyl peptidase 4 (DPP4).

3. The virus according to claim 1 isolatable from humans.

4. The virus according to claim 1 comprising a nucleic acid at least 75% identical with a nucleic acid selected from any of FIGS. 3 or 5 to 15.

5. The virus according to claim 1 belonging to the Coronaviruses, genus Betacoronavirus and identifiable as phylogenetically corresponding thereto by determining a nucleic acid or amino acid sequence of said virus and testing it in phylogenetic tree analyses wherein maximum likelihood trees are generated and finding it to be more closely phylogenetically corresponding to a virus isolate having the sequences as depicted in any of FIGS. 3 or 5 to 15 than it is corresponding to a bat coronavirus HKU4 or HKU5.

6. A nucleic acid obtainable from a virus according to claim 1.

7. A vector comprising a nucleic acid according to claim 6.

8. A cell comprising a virus according to claim 1.

9. A proteinaceous molecule encoded by a nucleic acid according to claim 6.

10. An antigen comprising a proteinaceous molecule according to claim 9.

11. An antibody specifically directed against an antigen according to claim 10.

12. A method for identifying a viral isolate as a MERS-CoV comprising reacting said viral isolate or a component thereof with a nucleic acid according to claim 9.

13. A method for virologically diagnosing a MERS-CoV infection of a mammal comprising determining in a sample of said mammal the presence of a viral isolate or component thereof by reacting said sample with a nucleic acid according to claim 6.

14. A method for serologically diagnosing a MERS-CoV infection of a mammal comprising determining in a sample of said mammal the presence of an antibody specifically directed against a Betacoronavirus, by reacting said sample with a proteinaceous molecule or fragment thereof according to claim 9.

15. A diagnostic kit for diagnosing a MERS-CoV infection comprising a virus according to claim 1.

16. A method of using the virus according to claim 1 for the production of a pharmaceutical composition for the production of a pharmaceutical composition for the treatment or prevention of a Betacoronavirus.

17. A pharmaceutical composition comprising a virus according to claim 1.

18. A method for the treatment or prevention of a Betacoronavirus comprising providing a mammal with a pharmaceutical composition according to claim 17.

19. A method for the treatment or prevention of atypical pneumonia and/or renal failure comprising providing an individual with a pharmaceutical composition according to claim 17.

20. A method for the treatment or prevention of a MERS-CoV infection comprising providing a mammal with a pharmaceutical composition according to claim 17.

21-22. (canceled)

23. A proteinaceous substance having been provided with a proteinaceous molecule according to claim 9 and additionally comprising at least a fragment of an N-terminal dipeptidyl peptidase protein.

24. A substance according to claim 23 wherein said proteinaceous molecule comprises an ectodomain of a spike protein.

25. A substance according to claim 23 or 24 above wherein said peptidase protein is a dipeptidyl peptidase 4 (DPP4).

26. A substance according to claim 23 having been subjected to crystallization.

27-36. (canceled)

37. A method of identifying a candidate modulator or a candidate antiviral agent as an agent that modulates the function or binding of a virus to dipeptidyl peptidase, the method comprising
a) providing said candidate modulator or said candidate antiviral agent under conditions permitting binding of a first fragment derived from a virus with a second fragment derived from a peptidase protein,
b) measuring binding of said first to said second fragment, wherein a decrease or increase in binding in the presence of said candidate modulator or said candidate antiviral agent, relative to binding in the absence of said candidate modulator or said candidate antiviral agent, identifies said candidate modulator or said candidate antiviral agent as an agent that modulates the function of a dipeptidyl peptidase.

38. The method of claim 37 wherein said first and/or said second fragment is detectably labeled.

The application's sequence listing, which the Patent Office published only in electronic form, follows.

SEQUENCE LISTING (1143 sequences)

SEQ ID NO: 1 - DNA, 24 bp, Artificial Sequence
  primer
gggtgtacctcttaatgccaattc

SEQ ID NO: 2 - DNA, 20 bp, Artificial Sequence
  primer
tctgtcctgtctccgccaat

SEQ ID NO: 3 - DNA, 21 bp, Artificial Sequence
  primer
acccctgcgcaaaatgctggg

SEQ ID NO: 4 - DNA, 455 bp, Human coronavirus
ggggttgggactatcctaagtgtgatagagctatgcctaatatgtgtagaatcttcgcttcactcatattagctcgtaaacatggcacttgttgtactacaagggacagattttatcgcttggcaaatgagtgtgctcaggtgctaagcgaatatgttctatgtggtggtggttactacgtcaaacctggaggtaccagtagcggagatgccaccactgcatatgccaatagtgtctttaacattttgcaggcgacaactgctaatgtcagtgcacttatgggtgctaatggcaacaagattgttgacaaagaagttaaagacatgcagtttgatttgtatgtcaatgtttacaggagcactagcccagaccccaaatttgttgataaatactatgcttttcttaataagcacttttctatgatgatactgtctgacgacggcgttgtgtgttaa

SEQ ID NO: 5 - protein, 413 aa, Human coronavirus
MASPAAPRAVSFADNNDITNTNLSRGRGRNPKPRAAPNNTVSWYTGLTQHGKVPLTFPPGQGVPLNANSTPAQNAGYWRRQDRKINTGNGIKQLAPRWYFYYTGTGPEAALPFRAVKDGIVWVHEDGATDAPSTFGTRNPNNDSAIVTQFAPGTKLPKNFHIEGTGGNSQSSSRASSLSRNSSRSSSQGSRSGNSTRGTSPGPSGIGAVGGDLLYLDLLNRLQALESGKVKQSQPKVITKKDAAAAKNKMRHKRTSTKSFNMVQAFGLRGPGDLQGNFGDLQLNKLGTEDPRWPQIAELAPTASAFMGMSQFKLTHQNNDDHGNPVYFLRYSGAIKLDPKNPNYNKWLELLEQNIDAYKTFPKKEKKQKAPKEESTDQMSEPPKEQRVQGSITQRTRTRPSVQPGPMIDVNTD

SEQ ID NO: 6 - protein, 219 aa, Human coronavirus
MSNMTQLTEAQIIAIIKDWNFAWSLIFLLITIVLQYGYPSRSMTVYVFKMFVLWLLWPSSMALSIFSAVYPIDLASQIISGIVAAVSAMMWISYFVQSIRLFMRTGSWWSFNPETNCLLNVPFGGTTVVRPLVEDSTSVTAVVTNGHLKMAGMHFGACDYDRLPNEVTVAKPNVLIALKMVKRQSYGTNSGVAIYHRYKAGNYRSPPITADIELALLRA

SEQ ID NO: 7 - protein, 82 aa, Human coronavirus
MLPFVQERIGLFIVNFFIFTVVCAITLLVCMAFLTATRLCVQCMTGFNTLLVQPALYLYNTGRSVYVKFQDSKPPLPPDEWV

SEQ ID NO: 8 - protein, 107 aa, Human coronavirus
MAFSASLFKPVQLVPVSPAFHRIESTDSIVFTYIPASGYVAALAVNVCLIPLLLLLRQDTCRRSIIRTMVLYFLVLYNFLLAIVLVNGVHYPTGSCLIAFLVILIIL

SEQ ID NO: 9 - protein, 246 aa, Human coronavirus
MEESLMDVPSTSGTQVYSRKARKRSHSPTKKLRYVKRRFSLLRHEDLSVIVQPTHYVRVTFSDPNMWYLRSGHHLHSVHNWLKPYGGQPVSEYHITLALLNLTDEDLARDFSPIALFLRNVRFELHEFALLRKTLVLNASEIYCANIHRFKPVYRVNTAIPTIKDWLLVQGFSLYHSGLPLHMSISKLHALDDVTRNYIITMPCFRTYPQQMFVTPLAVDVVSIRSSNQGNKQIVHSYPILHHPGF

SEQ ID NO: 10 - protein, 109 aa, Human coronavirus
MDYVSLLNQIWQKYLNSPYTTCLYIPKPTAKYTPLVGTSLHPVLWNCQLSFAGYTESAVNSTKALAKQDAAQRIAWLLHKDGGIPDGCSLYLRHSSLFAQSEEEEPFSN

SEQ ID NO: 11 - protein, 103 aa, Human coronavirus
MRVQRPPTLLLVFSLSLLVTASSKPLYVPEHCQNYSGCMLRACIKTAQADTAGLYTNFRIDVPSAESTGTQSVSVDLESTSTHDGPTEHVTSVNLFDVGYSVN

SEQ ID NO: 12 - protein, 1353 aa, Human coronavirus
MIHSVFLLMFLLTPTESYVDVGPDSVKSACIEVDIQQTFFDKTWPRPIDVSKADGIIYPQGRTYSNITITYQGLFPYQGDHGDMYVYSAGHATGTTPQKLFVANYSQDVKQFANGFVVRIGAAANSTGTVIISPSTSATIRKIYPAFMLGSSVGNFSDGKMGRFFNHTLVLLPDGCGTLLRAFYCILEPRSGNHCPAGNSYTSFATYHTPATDCSDGNYNRNASLNSFKEYFNLRNCTFMYTYNITEDEILEWFGITQTAQGVHLFSSRYVDLYGGNMFQFATLPVYDTIKYYSIIPHSIRSIQSDRKAWAAFYVYKLQPLTFLLDFSVDGYIRRAIDCGFNDLSQLHCSYESFDVESGVYSVSSFEAKPSGSVVEQAEGVECDFSPLLSGTPPQVYNFKRLVFTNCNYNLTKLLSLFSVNDFTCSQISPAAIASNCYSSLILDYFSYPLSMKSDLSVSSAGPISQFNYKQSFSNPTCLILATVPHNLTTITKPLKYSYINKCSRLLSDDRTEVPQLVNANQYSPCVSIVPSTVWEDGDYYRKQLSPLEGGGWLVASGSTVAMTEQLQMGFGITVQYGTDTNSVCPKLEFANDTKIASQLGNCVEYSLYGVSGRGVFQNCTAVGVRQQRFVYDAYQNLVGYYSDDGNYYCLRACVSVPVSVIYDKETKTHATLFGSVACEHISSTMSQYSRSTRSMLKRRDSTYGPLQTPVGCVLGLVNSSLFVEDCKLPLGQSLCALPDTPSTLTPRSVRSVPGEMRLASIAFNHPIQVDQLNSSYFKLSIPTNFSFGVTQEYIQTTIQKVTVDCKQYVCNGFQKCEQLLREYGQFCSKINQALHGANLRQDDSVRNLFASVKSSQSSPIIPGFGGDFNLTLLEPVSISTGSRSARSAIEDLLFDKVTIADPGYMQGYDDCMQQGPASARDLICAQYVAGYKVLPPLMDVNMEAAYTSSLLGSIAGVGWTAGLSSFAAIPFAQSIFYRLNGVGITQQVLSENQKLIANKFNQALGAMQTGFTTTNEAFQKVQDAVNNNAQALSKLASELSNTFGAISASIGDIIQRLDVLEQDAQIDRLINGRLTTLNAFVAQQLVRSESAALSAQLAKDKVNECVKAQSKRSGFCGQGTHIVSFVVNAPNGLYFMHVGYYPSNHIEVVSAYGLCDAANPTNCIAPVNGYFIKTNNTRIVDEWSYTGSSFYAPEPITSLNTKYVAPQVTYQNISTNLPPPLLGNSTGIDFQDELDEFFKNVSTSIPNFGSLTQINTTLLDLTYEMLSLQQVVKALNESYIDLKELGNYTYYNKWPWYIWLGFIAGLVALALCVFFILCCTGCGTNCMGKLKCNRCCDRYEEYDLEPHKVHVH

SEQ ID NO: 13 - protein, 7078 aa, Human coronavirus
MSFVAGVTAQGARGTYRAALNSEKHQDHVSLTVPLCGSGNLVEKLSPWFMDGENAYEVVKAMLLKKEPLLYVPIRLAGHTRHLPGPRVYLVERLIACENPFMVNQLAYSSSANGSLVGTTLQGKPIGMFFPYDIELVTGKQNILLRKYGRGGYHYTPFHYERDNTSCPEWMDDFEADPKGKYAQNLLKKLIGGDVTPVDQYMCGVDGKPISAYAFLMAKDGITKLADVEADVAARADDEGFITLKNNLYRLVWHVERKDVPYPKQSIFTINSVVQKDGVENTPPHYFTLGCKILTLTPRNKWSGVSDLSLKQKLLYTFYGKESLENPTYIYHSAFIECGSCGNDSWLTGNAIQGFACGCGASYTANDVEVQSSGMIKPNALLCATCPFAKGDSCSSNCKHSVAQLVSYLSERCNVIADSKSFTLIFGGVAYAYFGCEEGTMYFVPRAKSVVSRIGDSIFTGCTGSWNKVTQIANMFLEQTQHSLNFVGEFVVNDVVLAILSGTTTNVDKIRQLLKGVTLDKLRDYLADYDVAVTAGPFMDNAINVGGTGLQYAAITAPYVVLTGLGESFKKVATIPYKVCNSVKDTLAYYAHSVLYRVFPYDMDSGVSSFSELLFDCVDLSVASTYFLVRILQDKTGDFMSTIITSCQTAVSKLLDTCFEATEATFNFLLDLAGLFRIFLRNAYVYTSQGFVVVNGKVSTLVKQVLDLLNKGMQLLHTKVSWAGSKIIAVIYSGRESLIFPSGTYYCVTTKAKSVQQDLDVILPGEFSKKQLGLLQPTDNSTTVSVTVSSNMVETVVGQLEQTNMHSPDVIVGDYVIISEKLFVRSKEEDGFAFYPACTNGHAVPTLFRLKGGAPSKKVAFGGDQVHEVAAVRSVTVEYNIHAVLDTLLASSSLRTFVVDKSLSIEEFADVVKEQVSDLLVKLLRGMPIPDFDLDDFIDAPCYCFNAEGDASWSSTMIFSLHPVECDEECSEVEASDLEEGESECISETSTEQVDVSHETSDDEWAAAVDEAFPLDEAEDVTESVQEEAQPVEVPVEDIAQVVIADTLQETPVVPDTVEVPPQVVKLPSAPQTIQPEVKEVAPVYEADTEQTQNVTVKPKRLRKKRNVDPLSNFEHKVITECVTIVLGDAIQVAKCYGESVLVNAANTHLKHGGGIAGAINAASKGAVQKESDEYILAKGPLQVGDSVLLQGHSLAKNILHVVGPDARAKQDVSLLSKCYKAMNAYPLVVTPLVSAGIFGVKPAVSFDYLIREAKTRVLVVVNSQDVYKSLTIVDIPQSLTFSYDGLRGAIRKAKDYGFTVFVCTDNSANTKVLRNKGVDYTKKFLTVDGVQYYCYTSKDTLDDILQQANKSVGIISMPLGYVSHGLDLMQAGSVVRRVNVPYVCLLANKEQEAILMSEDVKLNPSEDFIKHVRTNGGYNSWHLVEGELLVQDLRLNKLLHWSDQTICYKDSVFYVVKNSTAFPFETLSACRAYLDSRTTQQLTIEVLVTVDGVNFRTVVLNNKNTYRSQLGCVFFNGADISDTIPDEKQNGHSLYLADNLTADETKALKELYGPVDPTFLHRFYSLKAAVHGWKMVVCDKVRSLKLSDNNCYLNAVIMTLDLLKDIKFVIPALQHAFMKHKGGDSTDFIALIMAYGNCTFGAPDDASRLLHTVLAKAELCCSARMVWREWCNVCGIKDVVLQGLKACCYVGVQTVEDLRARMTYVCQCGGERHRQLVEHTTPWLLLSGTPNEKLVTTSTAPDFVAFNVFQGIETAVGHYVHARLKGGLILKFDSGTVSKTSDWKCKVTDVLFPGQKYSSDCNVVRYSLDGNFRTEVDPDLSAFYVKDGKYFTSEPPVTYSPATILAGSVYTNSCLVSSDGQPGGDAISLSFNNLLGFDSSKPVTKKYTYSFLPKEDGDVLLAEFDTYDPIYKNGAMYKGKPILWVNKASYDTNLNKFNRASLRQIFDVAPIELENKFTPLSVESTPVEPPTVDVVALQQEMTIVKCKGLNKPFVKDNVSFVADDSGTPVVEYLSKEDLHTLYVDPKYQVIVLKDNVLSSMLRLHTVESGDINVVAASGSLTRKVKLLFRASFYFKEFATRTFTATTAVGSCIKSVVRHLGVTKGILTGCFSFAKMLFMLPLAYFSDSKLGTTEVKVSALKTAGVVTGNVVKQCCTAAVDLSMDKLRRVDWKSTLRLLLMLCTTMVLLSSVYHLYVFNQVLSSDVMFEDAQGLKKFYKEVRAYLGISSACDGLASAYRANSFDVPTFCANRSAMCNWCLISQDSITHYPALKMVQTHLSHYVLNIDWLWFAFETGLAYMLYTSAFNWLLLAGTLHYFFAQTSIFVDWRSYNYAVSSAFWLFTHIPMAGLVRMYNLLACLWLLRKFYQHVINGCKDTACLLCYKRNRLTRVEASTVVCGGKRTFYITANGGISFCRRHNWNCVDCDTAGVGNTFICEEVANDLTTALRRPINATDRSHYYVDSVTVKETVVQFNYRRDGQPFYERFPLCAFTNLDKLKFKEVCKTTTGIPEYNFIIYDSSDRGQESLARSACVYYSQVLCKSILLVDSSLVTSVGDSSEIATKMFDSFVNSFVSLYNVTRDKLEKLISTARDGVRRGDNFHSVLTTFIDAARGPAGVESDVETNEIVDSVQYAHKHDIQITNESYNNYVPSYVKPDSVSTSDLGSLIDCNAASVNQIVLRNSNGACIWNAAAYMKLSDALKRQIRIACRKCNLAFRLTTSKLRANDNILSVRFTANKIVGGAPTWFNALRDFTLKGYVLATIIVFLCAVLMYLCLPTFSMAPVEFYEDRILDFKVLDNGIIRDVNPDDKCFANKHRSFTQWYHEHVGGVYDNSITCPLTVAVIAGVAGARIPDVPTTLAWVNNQIIFFVSRVFANTGSVCYTPIDEIPYKSFSDSGCILPSECTMFRDAEGRMTPYCHDPTVLPGAFAYSQMRPHVRYDLYDGNMFIKFPEVVFESTLRITRTLSTQYCRFGSCEYAQEGVCITTNGSWAIFNDHHLNRPGVYCGSDFIDIVRRLAVSLFQPITYFQLTTSLVLGIGLCAFLTLLFYYINKVKRAFADYTQCAVIAVVAAVLNSLCICFVTSIPLCIVPYTALYYYATFYFTNEPAFIMHVSWYIMFGPIVPIWMTCVYTVAMCFRHFFWVLAYFSKKHVEVFTDGKLNCSFQDAASNIFVINKDTYAALRNSLTNDAYSRFLGLFNKYKYFSGAMETAAYREAAACHLAKALQTYSETGSDLLYQPPNCSITSGVLQSGLVKMSHPSGDVEACMVQVTCGSMTLNGLWLDNTVWCPRHVMCPADQLSDPNYDALLISMTNHSFSVQKHIGAPANLRVVGHAMQGTLLKLTVDVANPSTPAYTFTTVKPGAAFSVLACYNGRPTGTFTVVMRPNYTIKGSFLCGSCGSVGYTKEGSVINFCYMHQMELANGTHTGSAFDGTMYGAFMDKQVHQVQLTDKYCSVNVVAWLYAAILNGCAWFVKPNRTSVVSFNEWALANQFTEFVGTQSVDMLAVKTGVAIEQLLYAIQQLYTGFQGKQILGSTMLEDEFTPEDVNMQIMGVVMQSGVRKVTYGTAHWLFATLVSTYVIILQATKFTLWNYLFETIPTQLFPLLFVTMAFVMLLVKHKHTFLTLFLLPVAICLTYANIVYEPTTPISSALIAVANWLAPTNAYMRTTHTDIGVYISMSLVLVIVVKRLYNPSLSNFALALCSGVMWLYTYSIGEASSPIAYLVFVTTLTSDYTITVFVTVNLAKVCTYAIFAYSPQLTLVFPEVKMILLLYTCLGFMCTCYFGVFSLLNLKLRAPMGVYDFKVSTQEFRFMTANNLTAPRNSWEAMALNFKLIGIGGTPCIKVAAMQSKLTDLKCTSVVLLSVLQQLHLEANSRAWAFCVKCHNDILAATDPSEAFEKFVSLFATLMTFSGNVDLDALASDIFDTPSVLQATLSEFSHLATFAELEAAQKAYQEAMDSGDTSPQVLKALQKAVNIAKNAYEKDKAVARKLERMADQAMTSMYKQARAEDKKAKIVSAMQTMLFGMIKKLDNDVLNGIISNARNGCIPLSVIPLCASNKLRVVIPDFTVWNQVVTYPSLNYAGALWDITVINNVDNEIVKSSDVVDSNENLTWPLVLECTRASTSAVKLQNNEIKPSGLKTMVVSAGQEQTNCNTSSLAYYEPVQGRKMLMALLSDNAYLKWARVEGKDGFVSVELQPPCKFLIAGPKGPEIRYLYFVKNLNNLHRGQVLGHIAATVRLQAGSNTEFASNSSVLSLVNFTVDPQKAYLDFVNAGGAPLTNCVKMLTPKTGTGIAISVKPESTADQETYGGASVCLYCRAHIEHPDVSGVCKYKGKFVQIPAQCVRDPVGFCLSNTPCNVCQYWIGYGCNCDSLRQAALPQSKDSNFLNRVRGSIVNARIEPCSSGLSTDVVFRAFDICNYKAKVAGIGKYYKTNTCRFVELDDQGHHLDSYFVVKRHTMENYELEKHCYDLLRDCDAVAPHDFFIFDVDKVKTPHIVRQRLTEYTMMDLVYALRHFDQNSEVLKAILVKYGCCDVTYFENKLWFDFVENPSVIGVYHKLGERVRQAILNTVKFCDHMVKAGLVGVLTLDNQDLNGKWYDFGDFVITQPGSGVAIVDSYYSYLMPVLSMTDCLAAETHRDCDFNKPLIEWPLTEYDFTDYKVQLFEKYFKYWDQTYHANCVNCTDDRCVLHCANFNVLFAMTMPKTCFGPIVRKIFVDGVPFVVSCGYHYKELGLVMNMDVSLHRHRLSLKELMMYAADPAMHIASSNAFLDLRTSCFSVAALTTGLTFQTVRPGNFNQDFYDFVVSKGFFKEGSSVTLKHFFFAQDGNAAITDYNYYSYNLPTMCDIKQMLFCMEVVNKYFEIYDGGCLNASEVVVNNLDKSAGHPFNKFGKARVYYESMSYQEQDELFAMTKRNVIPTMTQMNLKYAISAKNRARTVAGVSILSTMTNRQYHQKMLKSMAATRGATCVIGTTKFYGGWDFMLKTLYKDVDNPHLMGWDYPKCDRAMPNMCRIFASLILARKHGTCCTTRDRFYRLANECAQVLSEYVLCGGGYYVKPGGTSSGDATTAYANSVFNILQATTANVSALMGANGNKIVDKEVKDMQFDLYVNVYRSTSPDPKFVDKYYAFLNKHFSMMILSDDGVVCYNSDYAAKGYIAGIQNFKETLYYQNNVFMSEAKCWVETDLKKGPHEFCSQHTLYIKDGDDGYFLPYPDPSRILSAGCFVDDIVKTDGTLMVERFVSLAIDAYPLTKHEDIEYQNVFWVYLQYIEKLYKDLTGHMLDSYSVMLCGDNSAKFWEEAFYRDLYSSPTTLQAVGSCVVCHSQTSLRCGTCIRRPFLCCKCCYDHVIATPHKMVLSVSPYVCNAPGCGVSDVTKLYLGGMSYFCVDHRPVCSFPLCANGLVFGLYKNMCTGSPSIVEFNRLATCDWTESGDYTLANTTTEPLKLFAAETLRATEEASKQSYAIATIKEIVGERQLLLVWEAGKSKPPLNRNYVFTGYHITKNSKVQLGEYIFERIDYSDAVSYKSSTTYKLTVGDIFVLTSHSVATLTAPTIVNQERYVKITGLYPTITVPEEFASHVANFQKSGYSKYVTVQGPPGTGKSHFAIGLAIYYPTARVVYTACSHAAVDALCEKAFKYLNIAKCSRIIPAKARVECYDRFKVNETNSQYLFSTINALPETSADILVVDEVSMCTNYDLSIINARIKAKHIVYVGDPAQLPAPRTLLTRGTLEPENFNSVTRLMCNLGPDIFLSMCYRCPKEIVSTVSALVYNNKLLAKKELSGQCFKILYKGNVTHDASSAINRPQLTFVKNFITANPAWSKAVFISPYNSQNAVSRSMLGLTTQTVDSSQGSEYQYVIFCQTADTAHANNINRFNVAITRAQKGILCVMTSQALFESLEFTELSFTNYKLQSQIVTGLFKDCSRETSGLSPAYAPTYVSVDDKYKTSDELCVNLNLPANVPYSRVISRMGFKLDATVPGYPKLFITREEAVRQVRSWIGFDVEGAHASRNACGTNVPLQLGFSTGVNFVVQPVGVVDTEWGNMLTGIAARPPPGEQFKHLVPLMHKGAAWPIVRRRIVQMLSDTLDKLSDYCTFVCWAHGFELTSASYFCKIGKEQKCCMCNRRAAAYSSPLQSYACWTHSCGYDYVYNPFFVDVQQWGYVGNLATNHDRYCSVHQGAHVASNDAIMTRCLAIHSCFIERVDWDIEYPYISHEKKLNSCCRIVERNVVRAALLAGSFDKVYDIGNPKGIPIVDDPVVDWHYFDAQPLTRKVQQLFYTEDMASRFADGLCLFWNCNVPKYPNNAIVCRFDTRVHSEFNLPGCDGGSLYVNKHAFHTPAYDVSAFRDLKPLPFFYYSTTPCEVHGNGSMIEDIDYVPLKSAVCITACNLGGAVCRKHATEYREYMEAYNLVSASGFRLWCYKTFDIYNLWSTFTKVQGLENIAFNVVKQGHFIGVEGELPVAVVNDKIFTKSGVNDICMFENKTTLPTNIAFELYAKRAVRSHPDFKLLHNLQADICYKFVLWDYERSNIYGTATIGVCKYTDIDVNSALNICFDIRDNCSLEKFMSTPNAIFISDRKIKKYPCMVGPDYAYFNGAIIRDSDVVKQPVKFYLYKKVNNEFIDPTECIYTQSRSCSDFLPLSDMEKDFLSFDSDVFIKKYGLENYAFEHVVYGDFSHTTLGGLHLLIGLYKKQQEGHIIMEEMLKGSSTIHNYFITETNTAAFKAVCSVIDLKLDDFVMILKSQDLGVVSKVVKVPIDLTMIEFMLWCKDGQVQTFYPRLQASADWKPGHAMPSLFKVQNVNLERCELANYKQSIPMPRGVHMNIAKYMQLCQYLNTCTLAVPANMRVIHFGAGSDKGIAPGTSVLRQWLPTDAIIIDNDLNEFVSDADITLFGDCVTVRVGQQVDLVISDMYDPTTKNVTGSNESKALFFTYLCNLINNNLALGGSVAIKITEHSWSVELYELMGKFAWWTVFCTNANASSSEGFLLGINYLGTIKENIDGGAMHANYIFWRNSTPMNLSTYSLFDLSKFQLKLKGTPVLQLKESQINELVISLLSQGKLLIRDNDTLSVSTDVLVNTYRKLR

SEQ ID NO: 14 - DNA, 30124 bp, Human coronavirus
  CDS (1)..(30123)
atttaagtgaatagcttggctatctcacttcccctcgttctcttgcagaactttgattttaacgaacttaaataaaagccctgttgtttagcgtatcgttgcacttgtctggtgggattgtggcattaatttgcctgctcatctaggcagtggacatatgctcaacactgggtataattctaattgaatactatttttcagttagagcgtcgtgtctcttgtacgtctcggtcacaatacacggtttcgtccggtgcgtggcaattcggggcacatcatgtctttcgtggctggtgtgaccgcgcaaggtgcgcgcggtacgtatcgagcagcgctcaactctgaaaaacatcaagaccatgtgtctctaactgtgccactctgtggttcaggaaacctggttgaaaaactttcaccatggttcatggatggcgaaaatgcctatgaagtggtgaaggccatgttacttaaaaaggagccacttctctatgtgcccatccggctggctggacacactagacacctcccaggtcctcgtgtgtacctggttgagaggctcattgcttgtgaaaatccattcatggttaaccaattggcttatagctctagtgcaaatggcagcctggttggcacaactttgcagggcaagcctattggtatgttcttcccttatgacatcgaacttgtcacaggaaagcaaaatattctcctgcgcaagtatggccgtggtggttatcactacaccccattccactatgagcgagacaacacctcttgccctgagtggatggacgattttgaggcggatcctaaaggcaaatatgcccagaatctgcttaagaagttgattggcggtgatgtcactccagttgaccaatacatgtgtggcgttgatggaaaacccattagtgcctacgcatttttaatggccaaggatggaataaccaaactggctgatgttgaagcggacgtcgcagcacgtgctgatgacgaaggcttcatcacattaaagaacaatctatatagattggtttggcatgttgagcgtaaagacgttccatatcctaagcaatctatttttactattaatagtgtggtccaaaaggatggtgttgaaaacactcctcctcactattttactcttggatgcaaaattttaacgctcaccccacgcaacaagtggagtggcgtttctgacttgtccctcaaacaaaaactcctttacaccttctatggtaaggagtcacttgagaacccaacctacatttaccactccgcattcattgagtgtggaagttgtggtaatgattcctggcttacagggaatgctatccaagggtttgcctgtggatgtggggcatcatatacagctaatgatgtcgaagtccaatcatctggcatgattaagccaaatgctcttctttgtgctacttgcccctttgctaagggtgatagctgttcttctaattgcaaacattcagttgctcagttggttagttacctttctgaacgctgtaatgttattgctgattctaagtccttcacacttatctttggtggcgtagcttacgcctactttggatgtgaggaaggtactatgtactttgtgcctagagctaagtctgttgtctcaaggattggagactccatctttacaggctgtactggctcttggaacaaggtcactcaaattgctaacatgttcttggaacagactcagcattcccttaactttgtgggagagttcgttgtcaacgatgttgtcctcgcaattctctctggaaccacaactaatgttgacaaaatacgccagcttctcaaaggtgtcacccttgacaagttgcgtgattatttagctgactatgacgtagcagtcactgccggcccattcatggataatgctattaatgttggtggtacaggattacagtatgccgccattactgcaccttatgtagttctcactggcttaggtgagtcctttaagaaagttgcaaccataccgtataaggtttgcaactctgttaaggatactctggcttattatgctcacagcgtgttgtacagagtttttccttatgacatggattctggtgtgtcatcctttagtgaactactttttgattgcgttgatctttcagtagcttctacctattttttagtccgcatcttgcaagataagactggcgactttatgtctacaattattacttcctgccaaactgctgttagtaagcttctagatacatgttttgaagctacagaagcaacatttaacttcttgttagatttggcaggattgttcagaatctttctccgcaatgcctatgtgtacacttcacaagggtttgtggtggtcaatggcaaagtttctacacttgtcaaacaagtgttagacttgcttaataagggtatgcaacttttgcatacaaaggtctcctgggctggttctaaaatcattgctgttatctacagcggcagggagtctctaatattcccatcgggaacctattactgtgtcaccactaaggctaagtccgttcaacaagatcttgacgttattttgcctggtgagttttccaagaagcagttaggactgctccaacctactgacaattctacaactgttagtgttactgtatccagtaacatggttgaaactgttgtgggtcaacttgagcaaactaatatgcatagtcctgatgttatagtaggtgactatgtcattattagtgaaaaattgtttgtgcgtagtaaggaagaagacggatttgccttctaccctgcttgcactaatggtcatgctgtaccgactctctttagacttaagggaggtgcacctagtaaaaaagtagcctttggcggtgatcaagtacatgaggttgctgctgtaagaagtgttactgtcgagtacaacattcatgctgtattagacacactacttgcttcttctagtcttagaacctttgttgtagataagtctttgtcaattgaggagtttgctgacgtagtaaaggaacaagtctcagacttgcttgttaaattactgcgtggaatgccgattccagattttgatttagacgattttattgacgcaccatgctattgctttaacgctgagggtgatgcatcctggtcttctactatgatcttctctcttcaccccgtcgagtgtgacgaggagtgttctgaagtagaggcttcagatttagaagaaggtgaatcagagtgcatttctgagacttcaactgaacaagttgacgtttctcatgagacttctgacgacgagtgggctgctgcagttgatgaagcgttccctctcgatgaagcagaagatgttactgaatctgtgcaagaagaagcacaaccagtagaagtacctgttgaagatattgcgcaggttgtcatagctgacaccttacaggaaactcctgttgtgcctgatactgttgaagtcccaccgcaagtggtgaaacttccgtctgcacctcagactatccagcccgaggtaaaagaagttgcacctgtctatgaggctgataccgaacagacacagaatgttactgttaaacctaagaggttacgcaaaaagcgtaatgttgaccctttgtccaattttgaacataaggttattacagagtgcgttaccatagttttaggtgacgcaattcaagtagccaagtgctatggggagtctgtgttagttaatgctgctaacacacatcttaagcatggcggtggtatcgctggtgctattaatgcggcttcaaaaggggctgtccaaaaagagtcagatgagtatattctggctaaagggccgttacaagtaggagattcagttctcttgcaaggccattctctagctaagaatatcctgcatgtcgtaggcccagatgcccgcgctaaacaggatgtttctctccttagtaagtgctataaggctatgaatgcatatcctcttgtagtcactcctcttgtttcagcaggcatatttggtgtaaaaccagctgtgtcttttgattatcttattagggaggctaagactagagttttagtcgtcgttaattcccaagatgtctataagagtcttaccatagttgacattccacagagtttgactttttcatatgatgggttacgtggcgcaatacgtaaagctaaagattatggttttactgtttttgtgtgcacagacaactctgctaacactaaagttcttaggaacaagggtgttgattatactaagaagtttcttacagttgacggtgtgcaatattattgctacacgtctaaggacactttagatgatatcttacaacaggctaataagtctgttggtattatatctatgcctttgggatatgtgtctcatggtttagacttaatgcaagcagggagtgtcgtgcgtagagttaacgtgccctacgtgtgtctcctagctaataaagagcaagaagctattttgatgtctgaagacgttaagttaaacccttcagaagattttataaagcacgtccgcactaatggtggttacaattcttggcatttagtcgagggtgaactattggtgcaagacttacgcttaaataagctcctgcattggtctgatcaaaccatatgctacaaggatagtgtgttttatgttgtaaagaatagtacagcttttccatttgaaacactttcagcatgtcgtgcgtatttggattcacgcacgacacagcagttaacaatcgaagtcttagtgactgtcgatggtgtaaattttagaacagtcgttctaaataataagaacacttatagatcacagcttggatgcgttttctttaatggtgctgatatttctgacaccattcctgatgagaaacagaatggtcacagtttatatctagcagacaatttgactgctgatgaaacaaaggcgcttaaagagttatatggccccgttgatcctactttcttacacagattctattcacttaaggctgcagtccatgggtggaagatggttgtgtgtgataaggtacgttctctcaaattgagtgataataattgttatcttaatgcagttattatgacacttgatttattgaaggacattaaatttgttatacctgctctacagcatgcatttatgaaacataagggcggtgattcaactgacttcatagccctcattatggcttatggcaattgcacatttggtgctccagatgatgcctctcggttacttcataccgtgcttgcaaaggctgagttatgctgttctgcacgcatggtttggagagagtggtgcaatgtctgtggcataaaagatgttgttctacaaggcttaaaagcttgttgttacgtgggtgtgcaaactgttgaagatctgcgtgctcgcatgacatatgtatgccagtgtggtggtgaacgtcatcggcaattagtcgaacacaccaccccctggttgctgctctcaggcacaccaaatgaaaaattggtgacaacctccacggcgcctgattttgtagcatttaatgtctttcagggcattgaaacggctgttggccattatgttcatgctcgcctgaagggtggtcttattttaaagtttgactctggcaccgttagcaagacttcagactggaagtgcaaggtgacagatgtacttttccccggccaaaaatacagtagcgattgtaatgtcgtacggtattctttggacggtaatttcagaacagaggttgatcccgacctatctgctttctatgttaaggatggtaaatactttacaagtgaaccacccgtaacatattcaccagctacaattttagctggtagtgtctacactaatagctgccttgtatcgtctgatggacaacctggcggtgatgctattagtttgagttttaataaccttttagggtttgattctagtaaaccagtcactaagaaatacacttactccttcttgcctaaagaagacggcgatgtgttgttggctgagtttgacacttatgaccctatttataagaatggtgccatgtataaaggcaaaccaattctttgggtcaataaagcatcttatgatactaatcttaataagttcaatagagctagtttgcgtcaaatttttgacgtagcccccattgaactcgaaaataaattcacacctttgagtgtggagtctacaccagttgaacctccaactgtagatgtggtagcacttcaacaggaaatgacaattgtcaaatgtaagggtttaaataaacctttcgtgaaggacaatgtcagtttcgttgctgatgattcaggtactcccgttgttgagtatctgtctaaagaagacctacatacattgtatgtagaccctaagtatcaagtcattgtcttaaaagacaatgtactttcttctatgcttagattgcacaccgttgagtcaggtgatattaacgttgttgcagcttccggatctttgacacgtaaagtgaagttactatttagggcttcattttatttcaaagaatttgctacccgcactttcactgctaccactgctgtaggtagttgtataaagagtgtagtgcggcatctaggtgttactaaaggcatattgacaggctgttttagttttgccaagatgttatttatgcttccactagcttactttagtgattcaaaactcggcaccacagaggttaaagtgagtgctttgaaaacagccggcgttgtgacaggtaatgttgtaaaacagtgttgcactgctgctgttgatttaagtatggataagttgcgccgtgtggattggaaatcaaccctacggttgttacttatgttatgcacaactatggtattgttgtcttctgtgtatcacttgtatgtcttcaatcaggtcttatcaagtgatgttatgtttgaagatgcccaaggtttgaaaaagttctacaaagaagttagagcttacctaggaatctcttctgcttgtgacggtcttgcttcagcttatagggcgaattcctttgatgtacctacattctgcgcaaaccgttctgcaatgtgtaattggtgcttgattagccaagattccataactcactacccagctcttaagatggttcaaacacatcttagccactatgttcttaacatagattggttgtggtttgcatttgagactggtttggcatacatgctctatacctcggccttcaactggttgttgttggcaggtacattgcattatttctttgcacagacttccatatttgtagactggcggtcatacaattatgctgtgtctagtgccttctggttattcacccacattccaatggcgggtttggtacgaatgtataatttgttagcatgcctttggcttttacgcaagttttatcagcatgtaatcaatggttgcaaagatacggcatgcttgctctgctataagaggaaccgacttactagagttgaagcttctaccgttgtctgtggtggaaaacgtacgttttatatcacagcaaatggcggtatttcattctgtcgtaggcataattggaattgtgtggattgtgacactgcaggtgtggggaataccttcatctgtgaagaagtcgcaaatgacctcactaccgccctacgcaggcctattaacgctacggatagatcacattattatgtggattccgttacagttaaagagactgttgttcagtttaattatcgtagagacggtcaaccattctacgagcggtttcccctctgcgcttttacaaatctagataagttgaagttcaaagaggtctgtaaaactactactggtatacctgaatacaactttatcatctacgactcatcagatcgtggccaggaaagtttagctaggtctgcatgtgtttattattctcaagtcttgtgtaaatcaattcttttggttgactcaagtttggttacttctgttggtgattctagtgaaatcgccactaaaatgtttgattcctttgttaatagtttcgtctcgctgtataatgtcacacgcgataagttggaaaaacttatctctactgctcgtgatggcgtaaggcgaggcgataacttccatagtgtcttaacaacattcattgacgcagcacgaggccccgcaggtgtggagtctgatgttgagaccaatgaaattgttgactctgtgcagtatgctcataaacatgacatacaaattactaatgagagctacaataattatgtaccctcatatgttaaacctgatagtgtgtctaccagcgatttaggtagtctcattgattgtaatgcggcttcagttaaccaaattgtcttgcgtaattctaatggtgcttgcatttggaacgctgctgcatatatgaaactctcggatgcacttaaacgacagattcgcattgcatgccgtaagtgtaatttagctttccggttaaccacctcaaagctacgcgctaatgataatatcttatcagttagattcactgctaacaaaattgttggtggtgctcctacatggtttaatgcgttgcgtgactttacgttaaagggttatgttcttgctaccattattgtgtttctgtgtgctgtactgatgtatttgtgtttacctacattttctatggcacctgttgaattttatgaagaccgcatcttggactttaaagttcttgataatggtatcattagggatgtaaatcctgatgataagtgctttgctaataagcaccggtccttcacacaatggtatcatgagcatgttggtggtgtctatgacaactctatcacatgcccattgacagttgcagtaattgctggagttgctggtgctcgcattccagacgtacctactacattggcttgggtgaacaatcagataattttctttgtttctcgagtctttgctaatacaggcagtgtttgctacactcctatagatgagataccctataagagtttctctgatagtggttgcattcttccatctgagtgcactatgtttagggatgcagagggccgtatgacaccatactgccatgatcctactgttttgcctggggcttttgcgtacagtcagatgaggcctcatgttcgttacgacttgtatgatggtaacatgtttattaaatttcctgaagtagtatttgaaagtacacttaggattactagaactctgtcaactcagtactgccggttcggtagttgtgagtatgcacaagagggtgtttgtattaccacaaatggctcgtgggccatttttaatgaccaccatcttaatagacctggtgtctattgtggctctgattttattgacattgtcaggcggttagcagtatcactgttccagcctattacttatttccaattgactacctcattggtcttgggtataggtttgtgtgcgttcctgactttgctcttctattatattaataaagtaaaacgtgcttttgcagattacacccagtgtgctgtaattgctgttgttgctgctgttcttaatagcttgtgcatctgctttgttacctctataccattgtgtatagtaccttacactgcattgtactattatgctacattctattttactaatgagcctgcatttattatgcatgtttcttggtacattatgttcgggcctatcgttcccatatggatgacctgcgtctatacagttgcaatgtgctttagacacttcttctgggttttagcttattttagtaagaaacatgtagaagtttttactgatggtaagcttaattgtagtttccaggacgctgcctctaatatctttgttattaacaaggacacttatgcagctcttagaaactctttaactaatgatgcctattcacgatttttggggttgtttaacaagtataagtacttctctggtgctatggaaacagccgcttatcgtgaagctgcagcatgtcatcttgctaaagccttacaaacatacagcgagactggtagtgatcttctttaccaaccacccaactgtagcataacctctggcgtgttgcaaagcggtttggtgaaaatgtcacatcccagtggagatgttgaggcttgtatggttcaggttacctgcggtagcatgactcttaatggtctttggcttgacaacacagtctggtgcccacgacacgtaatgtgcccggctgaccagttgtctgatcctaattatgatgccttgttgatttctatgactaatcatagtttcagtgtgcaaaaacacattggcgctccagcaaacttgcgtgttgttggtcatgccatgcaaggcactcttttgaagttgactgtcgatgttgctaaccctagcactccagcctacacttttacaacagtgaaacctggcgcagcatttagtgtgttagcatgctataatggtcgtccgactggtacattcactgttgtaatgcgccctaactacacaattaagggttcctttctgtgtggttcttgtggtagtgttggttacaccaaggagggtagtgtgatcaatttctgttacatgcatcaaatggaacttgctaatggtacacataccggttcagcatttgatggtactatgtatggtgcctttatggataaacaagtgcaccaagttcagttaacagacaaatactgcagtgttaatgtagtagcttggctttacgcagcaatacttaatggttgcgcttggtttgtaaaacctaatcgcactagtgttgtttcttttaatgaatgggctcttgccaaccaattcactgaatttgttggcactcaatccgttgacatgttagctgtcaaaacaggcgttgctattgaacagctgctttatgcgatccaacaactgtatactgggttccagggaaagcaaatccttggcagtaccatgttggaagatgaattcacacctgaggatgttaatatgcagattatgggtgtggttatgcagagtggtgtgagaaaagttacatatggtactgcgcattggttgtttgcgacccttgtctcaacctatgtgataatcttacaagccactaaatttactttgtggaactacttgtttgagactattcccacacagttgttcccactcttatttgtgactatggccttcgttatgttgttggttaaacacaaacacacctttttgacacttttcttgttgcctgtggctatttgtttgacttatgcaaacatagtctacgagcccactactcccatttcgtcagcgctgattgcagttgcaaattggcttgcccccactaatgcttatatgcgcactacacatactgatattggtgtctacattagtatgtcacttgtattagtcattgtagtgaagagattgtacaacccatcactttctaactttgcgttagcattgtgcagtggtgtaatgtggttgtacacttatagcattggagaagcctcaagccccattgcctatctggtttttgtcactacactcactagtgattatacgattacagtctttgttactgtcaaccttgcaaaagtttgcacttatgccatctttgcttactcaccacagcttacacttgtgtttccggaagtgaagatgatacttttattatacacatgtttaggtttcatgtgtacttgctattttggtgtcttctctcttttgaaccttaagcttagagcacctatgggtgtctatgactttaaggtctcaacacaagagttcagattcatgactgctaacaatctaactgcacctagaaattcttgggaggctatggctctgaactttaagttaataggtattggcggtacaccttgtataaaggttgctgctatgcagtctaaacttacagatcttaaatgcacatctgtggttctcctctctgtgctccaacagttacacttagaggctaatagtagggcctgggctttctgtgttaaatgccataatgatatattggcagcaacagaccccagtgaggctttcgagaaattcgtaagtctctttgctactttaatgactttttctggtaatgtagatcttgatgcgttagctagtgatatttttgacactcctagcgtacttcaagctactctttctgagttttcacacttagctacctttgctgagttggaagctgcgcagaaagcctatcaggaagctatggactctggtgacacctcaccacaagttcttaaggctttgcagaaggctgttaatatagctaaaaacgcctatgagaaggataaggcagtggcccgtaagttagaacgtatggctgatcaggctatgacttctatgtataagcaagcacgtgctgaagacaagaaagcaaaaattgtcagtgctatgcaaactatgttgtttggtatgattaagaagctcgacaacgatgttcttaatggtatcatttctaacgctaggaatggttgtatacctcttagtgtcatcccactgtgtgcttcaaataaacttcgcgttgtaattcctgacttcaccgtctggaatcaggtagtcacatatccctcgcttaactacgctggggctttgtgggacattacagttataaacaatgtggacaatgaaattgttaagtcttcagatgttgtagacagcaatgaaaatttaacatggccacttgttttagaatgcactagggcatccacttctgccgttaagttgcaaaataatgagatcaaaccttcaggtctaaaaaccatggttgtgtctgcgggtcaagagcaaactaactgtaatactagttccttagcttattacgaacctgtgcagggtcgtaaaatgctgatggctcttctttctgataatgcctatctcaaatgggcgcgtgttgaaggtaaggacggatttgtcagtgtagagctacaacctccttgcaaattcttgattgcgggaccaaaaggacctgaaatccgatatctctattttgttaaaaatcttaacaaccttcatcgcgggcaagtgttagggcacattgctgcgactgttagattgcaagctggttctaacaccgagtttgcctctaattcctcggtgttgtcacttgttaacttcaccgttgatcctcaaaaagcttatctcgatttcgtcaatgcgggaggtgccccattgacaaattgtgttaagatgcttactcctaaaactggtacaggtatagctatatctgttaaaccagagagtacagctgatcaagagacttatggtggagcttcagtgtgtctctattgccgtgcgcatatagaacatcctgatgtctctggtgtttgtaaatataagggtaagtttgtccaaatccctgctcagtgtgtccgtgaccctgtgggattttgtttgtcaaataccccctgtaatgtctgtcaatattggattggatatgggtgcaattgtgactcgcttaggcaagcagcactgccccaatctaaagattccaattttttaaacgagtccggggttctattgtaaatgcccgaatagaaccctgttcaagtggtttgtccactgatgtcgtctttagggcatttgacatctgcaactataaggctaaggttgctggtattggaaaatactacaagactaatacttgtaggtttgtagaattagatgaccaagggcatcatttagactcctattttgtcgttaagaggcatactatggagaattatgaactagagaagcactgttacgacttgttacgtgactgtgatgctgtagctccccatgatttcttcatctttgatgtagacaaagttaaaacacctcatattgtacgtcagcgtttaactgagtacactatgatggatcttgtatatgccctgaggcactttgatcaaaatagcgaagtgcttaaggctatcttagtgaagtatggttgctgtgatgttacctactttgaaaataaactctggtttgattttgttgaaaatcccagtgttattggtgtttatcataaacttggagaacgtgtacgccaagctatcttaaacactgttaaattttgtgaccacatggtcaaggctggtttagtcggtgtgctcacactagacaaccaggaccttaatggcaagtggtatgattttggtgacttcgtaatcactcaacctggttcaggagtagctatagttgatagctactattcttatttgatgcctgtgctctcaatgaccgattgtctggccgctgagacacatagggattgtgattttaataaaccactcattgagtggccacttactgagtatgattttactgattataaggtacaactctttgagaagtactttaaatattgggatcagacgtatcacgcaaattgcgttaattgtactgatgaccgttgtgtgttacattgtgctaatttcaatgtattgtttgctatgaccatgcctaagacttgtttcggacccatagtccgaaagatctttgttgatggcgtgccatttgtagtatcttgtggttatcactacaaagaattaggtttagtcatgaatatggatgttagtctccatagacataggctctctcttaaggagttgatgatgtatgccgctgatccagccatgcacattgcctcctctaacgcttttcttgatttgaggacatcatgttttagtgtcgctgcacttacaactggtttgacttttcaaactgtgcggcctggcaattttaaccaagacttctatgatttcgtggtatctaaaggtttctttaaggagggctcttcagtgacgctcaaacattttttctttgctcaagatggtaatgctgctattacagattataattactattcttataatctgcctactatgtgtgacatcaaacaaatgttgttctgcatggaagttgtaaacaagtacttcgaaatctatgacggtggttgtcttaatgcttctgaagtggttgttaataatttagacaagagtgctggccatccttttaataagtttggcaaagctcgtgtctattatgagagcatgtcttaccaggagcaagatgaactttttgccatgacaaagcgtaacgtcattcctaccatgactcaaatgaatctaaaatatgctattagtgctaagaatagagctcgcactgttgcaggcgtgtccatacttagcacaatgactaatcgccagtaccatcagaaaatgcttaagtccatggctgcaactcgtggagcgacttgcgtcattggtactacaaagttctacggtggctgggatttcatgcttaaaacattgtacaaagatgttgataatccgcatcttatgggttgggattaccctaagtgtgatagagctatgcctaatatgtgtagaatcttcgcttcactcatattagctcgtaaacatggcacttgttgtactacaagggacagattttatcgcttggcaaatgagtgtgctcaggtgctaagcgaatatgttctatgtggtggtggttactacgtcaaacctggaggtaccagtagcggagatgccaccactgcatatgccaatagtgtctttaacattttgcaggcgacaactgctaatgtcagtgcacttatgggtgctaatggcaacaagattgttgacaaagaagttaaagacatgcagtttgatttgtatgtcaatgtttacaggagcactagcccagaccccaaatttgttgataaatactatgcttttcttaataagcacttttctatgatgatactgtctgatgacggtgtcgtttgctataatagtgattatgcagctaagggttacattgctggaatacagaattttaaggaaacgctgtattatcagaacaatgtctttatgtctgaagctaaatgctgggtggaaaccgatctgaagaaagggccacatgaattctgttcacagcatacgctttatattaaggatggcgacgatggttacttccttccttatccagacccttcaagaattttgtctgccggttgctttgtagatgatatcgttaagactgacggtacactcatggtagagcggtttgtgtctttggctatagatgcttaccctctcacaaagcatgaagatatagaataccagaatgtattctgggtctacttacagtatatagaaaaactgtataaagaccttacaggacacatgcttgacagttattctgtcatgctatgtggtgataattctgctaagttttgggaagaggcattctatagagatctctatagttcgcctaccactttgcaggctgtcggttcatgcgttgtatgccattcacagacttccctacgctgtgggacatgcatccgtagaccatttctctgctgtaaatgctgctatgatcatgttatagcaactccacataagatggttttgtctgtttctccttacgtttgtaatgcccctggttgtggcgtttcagacgttactaagctatatttaggtggtatgagctacttttgtgtagatcatagacctgtgtgtagttttccactttgcgctaatggtcttgtattcggcttatacaagaatatgtgcacaggtagtccttctatagttgaatttaataggttggctacctgtgactggactgaaagtggtgattacacccttgccaatactacaacagaaccactcaaactttttgctgctgagactttacgtgccactgaagaggcgtctaagcagtcttatgctattgccaccatcaaagaaattgttggtgagcgccaactattacttgtgtgggaggctggcaagtccaaaccaccactcaatcgtaattatgtttttactggttatcatataaccaaaaatagtaaagtgcagctcggtgagtacattttcgagcgcattgattatagtgatgctgtatcctacaagtctagtacaacgtataaactgactgtaggtgacatcttcgtacttacctctcactctgtggctaccttgacggcgcccacaattgtgaatcaagagaggtatgttaaaattactgggttgtacccaaccattacggtacctgaagagttcgcaagtcatgttgccaacttccaaaaatcaggttatagtaaatatgtcactgttcagggaccacctggcactggcaaaagtcattttgctatagggttagcgatttactaccctacagcacgtgttgtttatacagcatgttcacacgcagctgttgatgctttgtgtgaaaaagcttttaaatatttgaacattgctaaatgttcccgtatcattcctgcaaaggcacgtgttgagtgctatgacaggtttaaagttaatgagacaaattctcaatatttgtttagtactattaatgctctaccagaaacttctgccgatattctggtggttgatgaggttagtatgtgcactaattatgatctttcaattattaatgcacgtattaaagctaagcacattgtctatgtaggagatccagcacagttgccagctcctaggactttgttgactagaggcacattggaaccagaaaatttcaatagtgtcactagattgatgtgtaacttaggtcctgacatatttttaagtatgtgctacaggtgtcctaaggaaatagtaagcactgtgagcgctcttgtctacaataataaattgttagccaagaaggagctttcaggccagtgctttaaaatactctataagggcaatgtgacgcatgatgctagctctgccattaatagaccacaactcacatttgtgaagaattttattactgccaatccggcatggagtaaggcagtctttatttcgccttacaattcacagaatgctgtgtctcgttcaatgctgggtcttaccactcagactgttgattcctcacagggttcagaataccagtacgttatcttctgtcaaacagcagatacggcacatgctaacaacattaacagatttaatgttgcaatcactcgtgcccaaaaaggtattctttgtgttatgacatctcaggcactctttgagtccttagagtttactgaattgtcttttactaattacaagctccagtctcagattgtaactggcctttttaaagattgctctagagaaacttctggcctctcacctgcttatgcaccaacatatgttagtgttgatgacaagtataagacgagtgatgagctttgcgtgaatcttaatttacccgcaaatgtcccatactctcgtgttatttccaggatgggctttaaactcgatgcaacagttcctggatatcctaagcttttcattactcgtgaagaggctgtaaggcaagttcgaagctggataggcttcgatgttgagggtgctcatgcttcccgtaatgcatgtggcaccaatgtgcctctacaattaggattttcaactggtgtgaactttgttgttcagccagttggtgttgtagacactgagtggggtaacatgttaacgggcattgctgcacgtcctccaccaggtgaacagtttaagcacctcgtgcctcttatgcataagggggctgcgtggcctattgttagacgacgtatagtgcaaatgttgtcagacactttagacaaattgtctgattactgtacgtttgtttgttgggctcatggctttgaattaacgtctgcatcatacttttgcaagataggtaaggaacagaagtgttgcatgtgcaatagacgcgctgcagcgtactcttcacctctgcaatcttatgcctgctggactcattcctgcggttatgattatgtctacaaccctttctttgtcgatgttcaacagtggggttatgtaggcaatcttgctactaatcacgatcgttattgctctgtccatcaaggagctcatgtggcttctaatgatgcaataatgactcgttgtttagctattcattcttgttttatagaacgtgtggattgggatatagagtatccttatatctcacatgaaaagaaattgaattcctgttgtagaatcgttgagcgcaacgtcgtacgtgctgctcttcttgccggttcatttgacaaagtctatgatattggcaatcctaaaggaattcctattgttgatgaccctgtggttgattggcattattttgatgcacagcccttgaccaggaaggtacaacagcttttctatacagaggacatggcctcaagatttgctgatgggctctgcttattttggaactgtaatgtaccaaaatatcctaataatgcaattgtatgcaggtttgacacacgtgtgcattctgagttcaatttgccaggttgtgatggcggtagtttgtatgttaacaagcacgcttttcatacaccagcatatgatgtgagtgcattccgtgatctgaaacctttaccattcttttattattctactacaccatgtgaagtgcatggtaatggtagtatgatagaggatattgattatgtacccctaaaatctgcagtctgtattacagcttgtaatttagggggcgctgtttgtaggaagcatgctacagagtacagagagtatatggaagcatataatcttgtctctgcatcaggtttccgcctttggtgttataagacctttgatatttataatctctggtctacttttacaaaagttcaaggtttggaaaacattgcttttaatgttgttaaacaaggccattttattggtgttgagggtgaactacctgtagctgtagtcaatgataagatcttcaccaagagtggcgttaatgacatttgtatgtttgagaataaaaccactttgcctactaatatagcttttgaactctatgctaagcgtgctgtacgctcgcatcccgatttcaaattgctacacaatttacaagcagacatttgctacaagttcgtcctttgggattatgaacgtagcaatatttatggtactgctactattggtgtatgtaagtacactgatattgatgttaattcagctttgaatatatgttttgacatacgcgataattgttcattggagaagttcatgtctactcccaatgccatctttatttctgatagaaaaatcaagaaatacccttgtatggtaggtcctgattatgcttacttcaatggtgctatcatccgtgatagtgatgttgttaaacaaccagtgaagttctacttgtataagaaagtcaataatgagtttattgatcctactgagtgtatttacactcagagtcgctcttgtagtgacttcctacccctttctgacatggagaaagactttctatcttttgatagtgatgttttcattaagaagtatggcttggaaaactatgcttttgagcacgtagtctatggagacttctctcatactacgttaggcggtcttcacttgcttattggtttatacaagaagcaacaggaaggtcatattattatggaagaaatgctaaaaggtagctcaactattcataactattttattactgagactaacacagcggcttttaaggcggtgtgttctgttatagatttaaagcttgacgactttgttatgattttaaagagtcaagaccttggcgtagtatccaaggttgtcaaggttcctattgacttaacaatgattgagtttatgttatggtgtaaggatggacaggttcaaaccttctaccctcgactccaggcttctgcagattggaaacctggtcatgcaatgccatccctctttaaagttcaaaatgtaaaccttgaacgttgtgagcttgctaattacaagcaatctattcctatgcctcgcggtgtgcacatgaacatcgctaaatatatgcaattgtgccagtatttaaatacttgcacattagccgtgcctgccaatatgcgtgttatacattttggcgctggttctgataaaggtatcgctcctggtacctcagttttacgacagtggcttcctacagatgccattattatagataatgatttaaatgagttcgtgtcagatgctgacataactttatttggagattgtgtaactgtacgtgtcggccaacaagtggatcttgttatttccgacatgtatgatcctactactaagaatgtaacaggtagtaatgagtcaaaggctttattctttacttacctgtgtaacctcattaataataatcttgctcttggtgggtctgttgctattaaaataacagaacactcttggagcgttgaactttatgaacttatgggaaaatttgcttggtggactgttttctgcaccaatgcaaatgcatcctcatctgaaggattcctcttaggtattaattacttgggtactattaaagaaaatatagatggtggtgctatgcacgccaactatatattttggagaaattccactcctatgaatctgagtacttactcactttttgatttatccaagtttcaattaaaattaaaaggaacaccagttcttcaattaaaggagagtcaaattaacgaactcgtaatatctctcctgtcgcagggtaagttacttatccgtgacaatgatacactcagtgtttctactgatgttcttgttaacacctacagaaagttacgttgatgtagggccagattctgttaagtctgcttgtattgaggttgatatacaacagactttctttgataaaacttggcctaggccaattgatgtttctaaggctgacggtattatataccctcaaggccgtacatattctaacataactatcacttatcaaggtctttttccctatcagggagaccatggtgatatgtatgtttactctgcaggacatgctacaggcacaactccacaaaagttgtttgtagctaactattctcaggacgtcaaacagtttgctaatgggtttgtcgtccgtataggagcagctgccaattccactggcactgttattattagcccatctaccagcgctactatacgaaaaatttaccctgcttttatgctgggttcttcagttggtaatttctcagatggtaaaatgggccgcttcttcaatcatactctagttcttttgcccgatggatgtggcactttacttagagctttttattgtattctagagcctcgctctggaaatcattgtcctgctggcaattcctatacttcttttgccacttatcacactcctgcaacagattgttctgatggcaattacaatcgtaatgccagtctgaactcttttaaggagtattttaatttacgtaactgcacctttatgtacacttataacattaccgaagatgagattttagagtggtttggcattacacaaactgctcaaggtgttcacctcttctcatctcggtatgttgatttgtacggcggcaatatgtttcaatttgccaccttgcctgtttatgatactattaagtattattctatcattcctcacagtattcgttctatccaaagtgatagaaaagcttgggctgccttctacgtatataaacttcaaccgttaactttcctgttggatttttctgttgatggttatatacgcagagctatagactgtggttttaatgatttgtcacaactccactgctcatatgaatccttcgatgttgaatctggagtttattcagtttcgtctttcgaagcaaaaccttctggctcagttgtggaacaggctgaaggtgttgaatgtgatttttcacctcttctgtctggcacacctcctcaggtttataatttcaagcgtttggtttttaccaattgcaattataatcttaccaaattgctttcacttttttctgtgaatgattttacttgtagtcaaatatctccagcagcaattgctagcaactgttattcttcactgattttggattacttttcatacccacttagtatgaaatccgatctcagtgttagttctgctggtccaatatcccagtttaattataaacagtccttttctaatcccacatgtttgattttagcgactgttcctcataaccttactactattactaagcctcttaagtacagctatattaacaagtgctctcgtcttctttctgatgatcgtactgaagtacctcagttagtgaacgctaatcaatactcaccctgtgtatccattgtcccatccactgtgtgggaagacggtgattattataggaaacaactatctccacttgaaggtggtggctggcttgttgctagtggctcaactgttgccatgactgagcaattacagatgggctttggtattacagttcaatatggtacagacaccaatagtgtttgccccaagcttgaatttgctaatgacacaaaaattgcctctcaattaggcaattgcgtggaatattccctctatggtgtttcgggccgtggtgtttttcagaattgcacagctgtaggtgttcgacagcagcgctttgtttatgatgcgtaccagaatttagttggctattattctgatgatggcaactactactgtttgcgtgcttgtgttagtgttcctgtttctgtcatctatgataaagaaactaaaacccacgctactctatttggtagtgttgcatgtgaacacatttcttctaccatgtctcaatactcccgttctacgcgatcaatgcttaaacggcgagattctacatatggcccccttcagacacctgttggttgtgtcctaggacttgttaattcctctttgttcgtagaggactgcaagttgcctcttggtcaatctctctgtgctcttcctgacacacctagtactctcacacctcgcagtgtgcgctctgttccaggtgaaatgcgcttggcatccattgcttttaatcatcctattcaggttgatcaacttaatagtagttattttaaattaagtatacccactaatttttcctttggtgtgactcaggagtacattcagacaaccattcagaaagttactgttgattgtaaacagtacgtttgcaatggtttccagaagtgtgagcaattactgcgcgagtatggccagttttgttccaaaataaaccaggctctccatggtgccaatttacgccaggatgattctgtacgtaatttgtttgcgagcgtgaaaagctctcaatcatctcctatcataccaggttttggaggtgactttaatttgacacttctagaacctgtttctatatctactggcagtcgtagtgcacgtagtgctattgaggatttgctatttgacaaagtcactatagctgatcctggttatatgcaaggttacgatgattgcatgcagcaaggtccagcatcagctcgtgatcttatttgtgctcaatatgtggctggttacaaagtattacctcctcttatggatgttaatatggaagccgcgtatacttcatctttgcttggcagcatagcaggtgttggctggactgctggcttatcctcctttgctgctattccatttgcacagagtatcttttataggttaaacggtgttggcattactcaacaggttctttcagagaaccaaaagcttattgccaataagtttaatcaggctctgggagctatgcaaacaggcttcactacaactaatgaagcttttcagaaggttcaggatgctgtgaacaacaatgcacaggctctatccaaattagctagcgagctatctaatacttttggtgctatttccgcctctattggagacatcatacaacgtcttgatgttctcgaacaggacgcccaaatagacagacttattaatggccgtttgacaacactaaatgcttttgttgcacagcagcttgttcgttccgaatcagctgctctttccgctcaattggctaaagataaagtcaatgagtgtgtcaaggcacaatccaagcgttctggattttgcggtcaaggcacacatatagtgtcctttgttgtaaatgcccctaatggcctttacttcatgcatgttggttattaccctagcaaccacattgaggttgtttctgcttatggtctttgcgatgcagctaaccctactaattgtatagcccctgttaatggctactttattaaaactaataacactaggattgttgatgagtggtcatatactggctcgtccttctatgcacctgagcccattacctcccttaatactaagtatgttgcaccacaggtgacataccaaaacatttctactaacctccctcctcctcttctcggcaattccaccgggattgacttccaagatgagttggatgagtttttcaaaaatgttagcaccagtatacctaattttggttccctaacacagattaatactacattactcgatcttacctacgagatgttgtctcttcaacaagttgttaaagcccttaatgagtcttacatagaccttaaagagcttggcaattatacttattacaacaaatggccgtggtacatttggcttggtttcattgctgggcttgttgccttagctctatgcgtcttcttcatactgtgctgcactggttgtggcacaaactgtatgggaaaacttaagtgtaatcgttgttgtgatagatacgaggaatacgacctcgagccgcataaggttcatgttcactaattaacgaactattaatgagagttcaaagaccacccactctcttgttagtgttttcactctctcttttggtcactgcatcctcaaaacctctctatgtacctgagcattgtcagaattattctggttgcatgcttagggcttgtattaaaactgcccaagctgatacagctggtctttatacaaattttcgaattgacgtcccatctgcagaatcaactggtactcaatcagtttctgtcgatcttgagtcaacttcaactcatgatggtcctaccgaacatgttactagtgtgaatctttttgacgttggttactcagttaattaacgaactctatggattacgtgtctctgcttaatcaaatttggcagaagtaccttaactcaccgtatactacttgtttgtacatccctaaacccacagctaagtatacacctttagttggcacttcattgcaccctgtgctgtggaactgtcagctatcctttgctggttatactgaatctgctgttaattctacaaaagctttggccaaacaggacgcagctcagcgaatcgcttggttgctacataaggatggaggaatccctgatggatgttccctctacctccggcactcaagtttattcgcgcaaagcgaggaagaggagccattctccaactaagaaactgcgctacgttaagcgtagattttctcttctgcgccatgaagaccttagtgttattgtccaaccaacacactatgtcagggttacattttcagaccccaacatgtggtatctacgttcgggtcatcatttacactcagttcacaattggcttaaaccttatggcggccaacctgtttctgagtaccatattactctagctttgctaaatctcactgatgaagatttagctagagatttttcacccattgcgctctttttgcgcaatgtcagatttgagctacatgagttcgccttgctgcgcaaaactcttgttcttaatgcatcagagatctactgtgctaacatacatagatttaagcctgtgtatagagttaacacggcaatccctactattaaggattggcttctcgttcagggattttccctttaccatagtggcctccctttacatatgtcaatctctaaattgcatgcactggatgatgttactcgcaattacatcattacaatgccatgctttagaacttaccctcaacaaatgtttgttactcctttggccgtagatgttgtctccatacggtcttccaatcagggtaataaacaaattgttcattcttatcccattttacatcatccaggattttaacgaactatggctttctcggcgtctttatttaaacccgtccagctagtcccagtttctcctgcatttcatcgcattgagtctactgactctattgttttcacatacattcctgctagcggctatgtagctgctttagctgtcaatgtgtgtctcattcccctattattactgctacgtcaagatacttgtcgtcgcagcattatcagaactatggttctctatttccttgttctgtataactttttattagccattgtactagtcaatggtgtacattatccaactggaagttgcctgatagccttcttagttatcctcataatactttagtttgtagatagaattcgtttctgtctcatgctgaattcctacattccactgtttgacatgcgttcccactttattcgtgttagtacagtttcttctcatggtatggtccctgtaatacacaccaaaccattatttattagaaacttcgatcagcgttgcagctgttctcgttgtttttatttgcactcttccacttatatagagtgcacttatattagccgttttagtaagattagcctagtttctgtaactgacttctccttaaacggcaatgtttccactgttttcgtgcctgcaacgcgcgattcagttcctcttcacataatcgccccgagctcgcttatcgtttaagcagctctgcgctactatgggtcccgtgtagaggctaatccattagtctctctttggacatatggaaaacgaactatgttaccctttgtccaagaacgaatagggttgttcatagtaaactttttcatttttaccgtagtatgtgctataacactcttggtgtgtatggctttccttacggctactagattatgtgtgcaatgtatgacaggcttcaataccctgttagttcagcccgcattatacttgtataatactggacgttcagtctatgtaaaattccaggatagtaaaccccctctaccacctgacgagtgggtttaacgaactccttcataatgtctaatatgacgcaactcactgaggcgcagattattgccattattaaagactggaactttgcatggtccctgatctttctcttaattactatcgtactacagtatggatacccatcccgtagtatgactgtctatgtctttaaaatgtttgttttatggctcctatggccatcttccatggcgctatcaatatttagcgccgtttatccaattgatctagcttcccagataatctctggcattgtagcagctgtttcagctatgatgtggatttcctactttgtgcagagtatccggctgtttatgagaactggatcatggtggtcattcaatcctgagactaattgccttttgaacgttccatttggtggtacaactgtcgtacgtccactcgtagaggactctaccagtgtaactgctgttgtaaccaatggccacctcaaaatggctggcatgcatttcggtgcttgtgactacgacagacttcctaatgaagtcaccgtggccaaacccaatgtgctgattgctttaaaaatggtgaagcggcaaagctacggaactaattccggcgttgccatttaccatagatataaggcaggtaattacaggagtccgcctattacggcggatattgaacttgcattgcttcgagcttaggctctttagtaagagtatcttaattgattttaacgaatctcaatttcattgttatggcatcccctgctgcacctcgtgctgtttcctttgccgataacaatgatataacaaatacaaacctatctcgaggtagaggacgtaatccaaaaccacgagctgcaccaaataacactgtctcttggtacactgggcttacccaacacgggaaagtccctcttacctttccacctgggcagggtgtacctcttaatgccaattctacccctgcgcaaaatgctgggtattggcggagacaggacagaaaaattaataccgggaatggaattaagcaactggctcccaggtggtacttctactacactggaactggacccgaagcagcactcccattccgggctgttaaggatggcatcgtttgggtccatgaagatggcgccactgatgctccttcaacttttgggacgcggaaccctaacaatgattcagctattgttacacaattcgcgcccggtactaagcttcctaaaaacttccacattgaggggactggaggcaatagtcaatcatcttcaagagcctctagcttaagcagaaactcttccagatctagttcacaaggttcaagatcaggaaactctacccgcggcacttctccaggtccatctggaatcggagcagtaggaggtgatctactttaccttgatcttctgaacagactacaagcccttgagtctggcaaagtaaagcaatcgcagccaaaagtaatcactaagaaagatgctgctgctgctaaaaataagatgcgccacaagcgcacttccaccaaaagtttcaacatggtgcaagcttttggtcttcgcggaccaggagacctccagggaaactttggtgatcttcaattgaataaactcggcactgaggacccacgttggccccaaattgctgagcttgctcctacagccagtgcttttatgggtatgtcgcaatttaaacttacccatcagaacaatgatgatcatggcaaccctgtgtacttccttcggtacagtggagccattaaacttgacccaaagaatcccaactacaataagtggttggagcttcttgagcaaaatattgatgcctacaaaaccttccctaagaaggaaaagaaacaaaaggcaccaaaagaagaatcaacagaccaaatgtctgaacctccaaaggagcagcgtgtgcaaggtagcatcactcagcgcactcgcacccgtccaagtgttcagcctggtccaatgattgatgttaacactgattagtgtcactcaaagtaacaagatcgcggcaatcgtttgtgtttggcaaccccatctcaccatcgcttgtccactcttgcacagaatggaatcatgttgtaattacagtgcaataaggtaattataacccatttaattgatagctatgctttattaaagtgtgtagctgtagagagaatgttaaagactgtcacctctgcttgattgcaagtgaacagtgccccccgggaagagctctacagtgtgaaatgtaaataaaaaatagctattattcaattagattaggctaattagatgatttgcaaaaaaaaaaaaaaaaaa

SEQ ID NO: 15 - protein, 22 aa, Human coronavirus
VNSLAISLPLVLLQNFDFNELK

SEQ ID NO: 16 - protein, 17 aa, Human coronavirus
KPCCLAYRCTCLVGLWH

SEQ ID NO: 17 - protein, 15 aa, Human coronavirus
FACSSRQWTYAQHWV

SEQ ID NO: 18 - protein, 53 aa, Human coronavirus
LNTIFQLERRVSCTSRSQYTVSSGAWQFGAHHVFRGWCDRARCARYVSSSAQL

SEQ ID NO: 19 - protein, 19 aa, Human coronavirus
KTSRPCVSNCATLWFRKPG

SEQ ID NO: 20 - protein, 13 aa, Human coronavirus
KTFTMVHGWRKCL

SEQ ID NO: 21 - protein, 7 aa, Human coronavirus
SGEGHVT

SEQ ID NO: 22 - protein, 15 aa, Human coronavirus
KGATSLCAHPAGWTH

SEQ ID NO: 23 - protein, 10 aa, Human coronavirus
TPPRSSCVPG

SEQ ID NO: 24 - protein, 5 aa, Human coronavirus
EAHCL

SEQ ID NO: 25 - protein, 5 aa, Human coronavirus
KSIHG

SEQ ID NO: 26 - protein, 4 aa, Human coronavirus
PIGL

SEQ ID NO: 27 - protein, 21 aa, Human coronavirus
CKWQPGWHNFAGQAYWYVLPL

SEQ ID NO: 28 - protein, 27 aa, Human coronavirus
HRTCHRKAKYSPAQVWPWWLSLHPIPL

SEQ ID NO: 29 - protein, 7 aa, Human coronavirus
ARQHLLP

SEQ ID NO: 30 - protein, 5 aa, Human coronavirus
VDGRF

SEQ ID NO: 31 - protein, 8 aa, Human coronavirus
RQICPESA

SEQ ID NO: 32 - protein, 5 aa, Human coronavirus
EVDWR

SEQ ID NO: 33 - protein, 4 aa, Human coronavirus
CHSS

SEQ ID NO: 34 - protein, 6 aa, Human coronavirus
PIHVWR

SEQ ID NO: 35 - protein, 4 aa, Human coronavirus
WKTH

SEQ ID NO: 36 - protein, 15 aa, Human coronavirus
CLRIFNGQGWNNQTG

SEQ ID NO: 37 - protein, 7 aa, Human coronavirus
SGRRSTC

SEQ ID NO: 38 - protein, 11 aa, Human coronavirus
RRLHHIKEQSI

SEQ ID NO: 39 - protein, 5 aa, Human coronavirus
IGLAC

SEQ ID NO: 40 - protein, 5 aa, Human coronavirus
RRSIS

SEQ ID NO: 41 - protein, 6 aa, Human coronavirus
AIYFYY

SEQ ID NO: 42 - protein, 7 aa, Human coronavirus
CGPKGWC

SEQ ID NO: 43 - protein, 26 aa, Human coronavirus
KHSSSLFYSWMQNFNAHPTQQVEWRF

SEQ ID NO: 44 - protein, 13 aa, Human coronavirus
LVPQTKTPLHLLW

SEQ ID NO: 45 - protein, 11 aa, Human coronavirus
EPNLHLPLRIH

SEQ ID NO: 46 - protein, 5 aa, Human coronavirus
VWKLW

SEQ ID NO: 47 - protein, 21 aa, Human coronavirus
FLAYRECYPRVCLWMWGIIYS

SEQ ID NO: 48 - protein, 9 aa, Human coronavirus
CRSPIIWHD

SEQ ID NO: 49 - protein, 12 aa, Human coronavirus
AKCSSLCYLPLC

SEQ ID NO: 50 - protein, 9 aa, Human coronavirus
LQTFSCSVG

SEQ ID NO: 51 - protein, 16 aa, Human coronavirus
VLHTYLWWRSLRLLWM

SEQ ID NO: 52 - protein, 8 aa, Human coronavirus
GRYYVLCA

SEQ ID NO: 53 - protein, 25 aa, Human coronavirus
VCCLKDWRLHLYRLYWLLEQGHSNC

SEQ ID NO: 54 - protein, 10 aa, Human coronavirus
HVLGTDSAFP

SEQ ID NO: 55 - protein, 20 aa, Human coronavirus
LCGRVRCQRCCPRNSLWNHN

SEQ ID NO: 56 - protein, 11 aa, Human coronavirus
QNTPASQRCHP

SEQ ID NO: 57 - protein, 10 aa, Human coronavirus
RSSHCRPIHG

SEQ ID NO: 58 - protein, 22 aa, Human coronavirus
CWWYRITVCRHYCTLCSSHWLR

SEQ ID NO: 59 - protein, 7 aa, Human coronavirus
ESCNHTV

SEQ ID NO: 60 - protein, 5 aa, Human coronavirus
GLQLC

SEQ ID NO: 61 - protein, 17 aa, Human coronavirus
GYSGLLCSQRVVQSFSL

SEQ ID NO: 62 - protein, 8 aa, Human coronavirus
HGFWCVIL

SEQ ID NO: 63 - protein, 15 aa, Human coronavirus
SFSSFYLFFSPHLAR

SEQ ID NO: 64 - protein, 16 aa, Human coronavirus
DWRLYVYNYYFLPNCC

SEQ ID NO: 65 - protein, 6 aa, Human coronavirus
ASRYMF

SEQ ID NO: 66 - protein, 6 aa, Human coronavirus
SYRSNI

SEQ ID NO: 67 - protein, 42 aa, Human coronavirus
LLVRFGRIVQNLSPQCLCVHFTRVCGGQWQSFYTCQTSVRLA

SEQ ID NO: 68 - protein, 14 aa, Human coronavirus
GYATFAYKGLLGWF

SEQ ID NO: 69 - protein, 24 aa, Human coronavirus
NHCCYLQRQGVSNIPIGNLLLCHH

SEQ ID NO: 70 - protein, 6 aa, Human coronavirus
VRSTRS

SEQ ID NO: 71 - protein, 5 aa, Human coronavirus
RYFAW

SEQ ID NO: 72 - protein, 12 aa, Human coronavirus
VFQEAVRTAPTY

SEQ ID NO: 73 - protein, 5 aa, Human coronavirus
QFYNC

SEQ ID NO: 74 - protein, 5 aa, Human coronavirus
CYCIQ

SEQ ID NO: 75 - protein, 6 aa, Human coronavirus
NCCGST

SEQ ID NO: 76 - protein, 4 aa, Human coronavirus
CYSR

SEQ ID NO: 77 - protein, 4 aa, Human coronavirus
LCHY

SEQ ID NO: 78 - protein, 5 aa, Human coronavirus
KIVCA

SEQ ID NO: 79 - protein, 12 aa, Human coronavirus
GRRRICLLPCLH

SEQ ID NO: 80 - protein, 8 aa, Human coronavirus
WSCCTDSL

SEQ ID NO: 81 - protein, 4 aa, Human coronavirus
GRCT

SEQ ID NO: 82 - protein, 6 aa, Human coronavirus
KSSLWR

SEQ ID NO: 83 - protein, 24 aa, Human coronavirus
GCCCKKCYCRVQHSCCIRHTTCFF

SEQ ID NO: 84 - protein, 5 aa, Human coronavirus
NLCCR

SEQ ID NO: 85 - protein, 4 aa, Human coronavirus
VFVN

SEQ ID NO: 86 - protein, 11 aa, Human coronavirus
RSKGTSLRLAC

SEQ ID NO: 87 - protein, 10 aa, Human coronavirus
ITAWNADSRF

SEQ ID NO: 88 - protein, 5 aa, Human coronavirus
FRRFY

SEQ ID NO: 89 - protein, 6 aa, Human coronavirus
RTMLLL

SEQ ID NO: 90 - protein, 16 aa, Human coronavirus
CILVFYYDLLSSPRRV

SEQ ID NO: 91 - protein, 4 aa, Human coronavirus
RGVF

SEQ ID NO: 92 - protein, 9 aa, Human coronavirus
SRGFRFRRR

SEQ ID NO: 93 - protein, 5 aa, Human coronavirus
IRVHF

SEQ ID NO: 94 - protein, 7 aa, Human coronavirus
RRVGCCS

SEQ ID NO: 95 - protein, 5 aa, Human coronavirus
SVPSR

SEQ ID NO: 96 - protein, 5 aa, Human coronavirus
SRRCY

SEQ ID NO: 97 - protein, 13 aa, Human coronavirus
ICARRSTTSRSTC

SEQ ID NO: 98 - protein, 8 aa, Human coronavirus
RYCAGCHS

SEQ ID NO: 99 - protein, 9 aa, Human coronavirus
HLTGNSCCA

SEQ ID NO: 100 - protein, 26 aa, Human coronavirus
SPTASGETSVCTSDYPARGKRSCTCL

SEQ ID NO: 101 - protein, 9 aa, Human coronavirus
YRTDTECYC

SEQ ID NO: 102 - protein, 6 aa, Human coronavirus
EVTQKA

SEQ ID NO: 103 - protein, 5 aa, Human coronavirus
PFVQF

SEQ ID NO: 104 - protein, 11 aa, Human coronavirus
GYYRVRYHSFR

SEQ ID NO: 105 - protein, 14 aa, Human coronavirus
RNSSSQVLWGVCVS

SEQ ID NO: 106 - protein, 9 aa, Human coronavirus
AWRWYRWCY

SEQ ID NO: 107 - protein, 12 aa, Human coronavirus
CGFKRGCPKRVR

SEQ ID NO: 108 - protein, 4 aa, Human coronavirus
VYSG

SEQ ID NO: 109 - protein, 17 aa, Human coronavirus
RAVTSRRFSSLARPFSS

SEQ ID NO: 110 - protein, 12 aa, Human coronavirus
EYPACRRPRCPR

SEQ ID NO: 111 - protein, 6 aa, Human coronavirus
TGCFSP

SEQ ID NO: 112 - protein, 26 aa, Human coronavirus
GYECISSCSHSSCFSRHIWCKTSCVF

SEQ ID NO: 113 - protein, 5 aa, Human coronavirus
SFSRR

SEQ ID NO: 114 - protein, 5 aa, Human coronavirus
FPRCL

SEQ ID NO: 115 - protein, 5 aa, Human coronavirus
ESYHS

SEQ ID NO: 116 - protein, 9 aa, Human coronavirus
HSTEFDFFI

SEQ ID NO: 117 - protein, 7 aa, Human coronavirus
WVTWRNT

SEQ ID NO: 118 - protein, 14 aa, Human coronavirus
RLWFYCFCVHRQLC

SEQ ID NO: 119 - protein, 4 aa, Human coronavirus
EQGC

SEQ ID NO: 120 - protein, 5 aa, Human coronavirus
EVSYS

SEQ ID NO: 121 - protein, 9 aa, Human coronavirus
RCAILLLHV

SEQ ID NO: 122 - protein, 4 aa, Human coronavirus
GHFR

SEQ ID NO: 123 - protein, 5 aa, Human coronavirus
YLTTG

SEQ ID NO: 124 - protein, 26 aa, Human coronavirus
VCWYYIYAFGICVSWFRLNASRECRA

SEQ ID NO: 125 - protein, 8 aa, Human coronavirus
RALRVSPS

SEQ ID NO: 126 - protein, 8 aa, Human coronavirus
RARSYFDV

SEQ ID NO: 127 - protein, 13 aa, Human coronavirus
VKPFRRFYKARPH

SEQ ID NO: 128 - protein, 11 aa, Human coronavirus
WWLQFLAFSRG

SEQ ID NO: 129 - protein, 9 aa, Human coronavirus
TIGARLTLK

SEQ ID NO: 130 - protein, 5 aa, Human coronavirus
APALV

SEQ ID NO: 131 - protein, 7 aa, Human coronavirus
SNHMLQG

SEQ ID NO: 132 - protein, 7 aa, Human coronavirus
CVLCCKE

SEQ ID NO: 133 - protein, 5 aa, Human coronavirus
YSFSI

SEQ ID NO: 134 - protein, 30 aa, Human coronavirus
NTFSMSCVFGFTHDTAVNNRSLSDCRWCKF

SEQ ID NO: 135 - protein, 5 aa, Human coronavirus
NSRSK

SEQ ID NO: 136 - protein, 8 aa, Human coronavirus
ITAWMRFL

SEQ ID NO: 137 - protein, 15 aa, Human coronavirus
ETEWSQFISSRQFDC

SEQ ID NO: 138 - protein, 4 aa, Human coronavirus
NKGA

SEQ ID NO: 139 - protein, 6 aa, Human coronavirus
RVIWPR

SEQ ID NO: 140 - protein, 10 aa, Human coronavirus
SYFLTQILFT

SEQ ID NO: 141 - protein, 11 aa, Human coronavirus
GCSPWVEDGCV

SEQ ID NO: 142 - protein, 7 aa, Human coronavirus
GTFSQIE

SEQ ID NO: 143 - protein, 6 aa, Human coronavirus
CSYYDT

SEQ ID NO: 144 - protein, 5 aa, Human coronavirus
FIEGH

SEQ ID NO: 145 - protein, 13 aa, Human coronavirus
ICYTCSTACIYET

SEQ ID NO: 146 - protein, 17 aa, Human coronavirus
LHSPHYGLWQLHIWCSR

SEQ ID NO: 147 - protein, 12 aa, Human coronavirus
CLSVTSYRACKG

SEQ ID NO: 148 - protein, 37 aa, Human coronavirus
VMLFCTHGLERVVQCLWHKRCCSTRLKSLLLRGCANC

SEQ ID NO: 149 - protein, 14 aa, Human coronavirus
RSACSHDICMPVWW

SEQ ID NO: 150 - protein, 20 aa, Human coronavirus
TSSAISRTHHPLVAALRHTK

SEQ ID NO: 151 - protein, 9 aa, Human coronavirus
KIGDNLHGA

SEQ ID NO: 152 - protein, 4 aa, Human coronavirus
FCSI

SEQ ID NO: 153 - protein, 5 aa, Human coronavirus
CLSGH

SEQ ID NO: 154 - protein, 19 aa, Human coronavirus
NGCWPLCSCSPEGWSYFKV

SEQ ID NO: 155 - protein, 4 aa, Human coronavirus
LWHR

SEQ ID NO: 156 - protein, 20 aa, Human coronavirus
QDFRLEVQGDRCTFPRPKIQ

SEQ ID NO: 157 - protein, 8 aa, Human coronavirus
CRTVFFGR

SEQ ID NO: 158 - protein, 5 aa, Human coronavirus
FQNRG

SEQ ID NO: 159 - protein, 8 aa, Human coronavirus
SRPICFLC

SEQ ID NO: 160 - protein, 4 aa, Human coronavirus
ILYK

SEQ ID NO: 161 - protein, 13 aa, Human coronavirus
TTRNIFTSYNFSW

SEQ ID NO: 162 - protein, 5 aa, Human coronavirus
LPCIV

SEQ ID NO: 163 - protein, 5 aa, Human coronavirus
WTTWR

SEQ ID NO: 164 - protein, 4 aa, Human coronavirus
PFRV

SEQ ID NO: 165 - protein, 8 aa, Human coronavirus
EIHLLLLA

SEQ ID NO: 166 - protein, 8 aa, Human coronavirus
RRRRCVVG

SEQ ID NO: 167 - protein, 5 aa, Human coronavirus
EWCHV

SEQ ID NO: 168 - protein, 8 aa, Human coronavirus
RQTNSLGQ

SEQ ID NO: 169 - protein, 5 aa, Human coronavirus
FASNF

SEQ ID NO: 170 - protein, 4 aa, Human coronavirus
RSPH

SEQ ID NO: 171 - protein, 11 aa, Human coronavirus
IHTFECGVYTS

SEQ ID NO: 172 - protein, 18 aa, Human coronavirus
TSNCRCGSTSTGNDNCQM

SEQ ID NO: 173 - protein, 11 aa, Human coronavirus
TFREGQCQFRC

SEQ ID NO: 174 - protein, 6 aa, Human coronavirus
FRYSRC

SEQ ID NO: 175 - protein, 10 aa, Human coronavirus
RRPTYIVCRP

SEQ ID NO: 176 - protein, 15 aa, Human coronavirus
VSSHCLKRQCTFFYA

SEQ ID NO: 177 - protein, 4 aa, Human coronavirus
IAHR

SEQ ID NO: 178 - protein, 10 aa, Human coronavirus
RCCSFRIFDT

SEQ ID NO: 179 - protein, 5 aa, Human coronavirus
SEVTI

SEQ ID NO: 180 - protein, 20 aa, Human coronavirus
GFILFQRICYPHFHCYHCCR

SEQ ID NO: 181 - protein, 12 aa, Human coronavirus
LYKECSAASRCY

SEQ ID NO: 182 - protein, 7 aa, Human coronavirus
RHIDRLF

SEQ ID NO: 183 - protein, 13 aa, Human coronavirus
FCQDVIYASTSLL

SEQ ID NO: 184 - protein, 8 aa, Human coronavirus
FKTRHHRG

SEQ ID NO: 185 - protein, 12 aa, Human coronavirus
SECFENSRRCDR

SEQ ID NO: 186 - protein, 10 aa, Human coronavirus
CCKTVLHCCC

SEQ ID NO: 187 - protein, 4 aa, Human coronavirus
FKYG

SEQ ID NO: 188 - protein, 38 aa, Human coronavirus
VAPCGLEINPTVVTYVMHNYGIVVFCVSLVCLQSGLIK

SEQ ID NO: 189 - protein, 12 aa, Human coronavirus
RCPRFEKVLQRS

SEQ ID NO: 190 - protein, 9 aa, Human coronavirus
SLPRNLFCL

SEQ ID NO: 191 - protein, 6 aa, Human coronavirus
RSCFSL

SEQ ID NO: 192 - protein, 4 aa, Human coronavirus
GEFL

SEQ ID NO: 193 - protein, 12 aa, Human coronavirus
CTYILRKPFCNV

SEQ ID NO: 194 - protein, 4 aa, Human coronavirus
LVLD

SEQ ID NO: 195 - protein, 10 aa, Human coronavirus
PRFHNSLPSS

SEQ ID NO: 196 - protein, 6 aa, Human coronavirus
DGSNTS

SEQ ID NO: 197 - protein, 4 aa, Human coronavirus
PLCS

SEQ ID NO: 198 - protein, 8 aa, Human coronavirus
HRLVVVCI

SEQ ID NO: 199 - protein, 42 aa, Human coronavirus
DWFGIHALYLGLQLVVVGRYIALFLCTDFHICRLAVIQLCCV

SEQ ID NO: 200 - protein, 17 aa, Human coronavirus
CLLVIHPHSNGGFGTNV

SEQ ID NO: 201 - protein, 28 aa, Human coronavirus
FVSMPLAFTQVLSACNQWLQRYGMLALL

SEQ ID NO: 202 - protein, 5 aa, Human coronavirus
EEPTY

SEQ ID NO: 203 - protein, 24 aa, Human coronavirus
SFYRCLWWKTYVLYHSKWRYFILS

SEQ ID NO: 204 - protein, 6 aa, Human coronavirus
LELCGL

SEQ ID NO: 205 - protein, 10 aa, Human coronavirus
HCRCGEYLHL

SEQ ID NO: 206 - protein, 4 aa, Human coronavirus
RSRK

SEQ ID NO: 207 - protein, 9 aa, Human coronavirus
PHYRPTQAY

SEQ ID NO: 208 - protein, 10 aa, Human coronavirus
ITLLCGFRYS

SEQ ID NO: 209 - protein, 6 aa, Human coronavirus
RDCCSV

SEQ ID NO: 210 - protein, 18 aa, Human coronavirus
RRSTILRAVSPLRFYKSR

SEQ ID NO: 211 - protein, 7 aa, Human coronavirus
VEVQRGL

SEQ ID NO: 212 - protein, 6 aa, Human coronavirus
NYYWYT

SEQ ID NO: 213 - protein, 17 aa, Human coronavirus
IQLYHLRLIRSWPGKFS

SEQ ID NO: 214 - protein, 11 aa, Human coronavirus
VCMCLLFSSLV

SEQ ID NO: 215 - protein, 5 aa, Human coronavirus
INSFG

SEQ ID NO: 216 - protein, 8 aa, Human coronavirus
LKFGYFCW

SEQ ID NO: 217 - protein, 5 aa, Human coronavirus
FRLAV

SEQ ID NO: 218 - protein, 4 aa, Human coronavirus
CHTR

SEQ ID NO: 219 - protein, 9 aa, Human coronavirus
VGKTYLYCS

SEQ ID NO: 220 - protein, 6 aa, Human coronavirus
WRKARR

SEQ ID NO: 221 - protein, 6 aa, Human coronavirus
CLNNIH

SEQ ID NO: 222 - protein, 10 aa, Human coronavirus
RSTRPRRCGV

SEQ ID NO: 223 - protein, 6 aa, Human coronavirus
LCAVCS

SEQ ID NO: 224 - protein, 4 aa, Human coronavirus
HTNY

SEQ ID NO: 225 - protein, 6 aa, Human coronavirus
LCTLIC

SEQ ID NO: 226 - protein, 7 aa, Human coronavirus
CVYQRFR

SEQ ID NO: 227 - protein, 4 aa, Human coronavirus
CGFS

SEQ ID NO: 228 - protein, 5 aa, Human coronavirus
PNCLA

SEQ ID NO: 229 - protein, 17 aa, Human coronavirus
WCLHLERCCIYETLGCT

SEQ ID NO: 230 - protein, 8 aa, Human coronavirus
TTDSHCMP

SEQ ID NO: 231 - protein, 12 aa, Human coronavirus
FSFPVNHLKATR

SEQ ID NO: 232 - protein, 4 aa, Human coronavirus
YLIS

SEQ ID NO: 233 - protein, 10 aa, Human coronavirus
QNCWWCSYMV

SEQ ID NO: 234 - protein, 32 aa, Human coronavirus
LYVKGLCSCYHYCVSVCCTDVFVFTYIFYGTC

SEQ ID NO: 235 - protein, 6 aa, Human coronavirus
RPHLGL

SEQ ID NO: 236 - protein, 4 aa, Human coronavirus
GCKS

SEQ ID NO: 237 - protein, 9 aa, Human coronavirus
APVLHTMVS

SEQ ID NO: 238 - protein, 6 aa, Human coronavirus
ACWWCL

SEQ ID NO: 239 - protein, 43 aa, Human coronavirus
QLYHMPIDSCSNCWSCWCSHSRRTYYIGLGEQSDNFLCFSSLC

SEQ ID NO: 240 - protein, 10 aa, Human coronavirus
YRQCLLHSYR

SEQ ID NO: 241 - protein, 6 aa, Human coronavirus
WLHSSI

SEQ ID NO: 242 - protein, 4 aa, Human coronavirus
VHYV

SEQ ID NO: 243 - protein, 11 aa, Human coronavirus
GCRGPYDTILP

SEQ ID NO: 244 - protein, 22 aa, Human coronavirus
SYCFAWGFCVQSDEASCSLRLV

SEQ ID NO: 245 - protein, 10 aa, Human coronavirus
NSVNSVLPVR

SEQ ID NO: 246 - protein, 17 aa, Human coronavirus
VCTRGCLYYHKWLVGHF

SEQ ID NO: 247 - protein, 7 aa, Human coronavirus
TWCLLWL

SEQ ID NO: 248 - protein, 39 aa, Human coronavirus
HCQAVSSITVPAYYLFPIDYLIGLGYRFVCVPDFALLLY

SEQ ID NO: 249 - protein, 21 aa, Human coronavirus
SKTCFCRLHPVCCNCCCCCCS

SEQ ID NO: 250 - protein, 28 aa, Human coronavirus
LVHLLCYLYTIVYSTLHCIVLLCYILFY

SEQ ID NO: 251 - protein, 31 aa, Human coronavirus
ACIYYACFLVHYVRAYRSHMDDLRLYSCNVL

SEQ ID NO: 252 - protein, 9 aa, Human coronavirus
TLLLGFSLF

SEQ ID NO: 253 - protein, 7 aa, Human coronavirus
ETCRSFY

SEQ ID NO: 254 - protein, 6 aa, Human coronavirus
FPGRCL

SEQ ID NO: 255 - protein, 4 aa, Human coronavirus
YLCY

SEQ ID NO: 256 - protein, 7 aa, Human coronavirus
QGHLCSS

SEQ ID NO: 257 - protein, 4 aa, Human coronavirus
KLFN

SEQ ID NO: 258 - protein, 9 aa, Human coronavirus
CLFTIFGVV

SEQ ID NO: 259 - protein, 12 aa, Human coronavirus
VLLWCYGNSRLS

SEQ ID NO: 260 - protein, 7 aa, Human coronavirus
SCSMSSC

SEQ ID NO: 261 - protein, 9 aa, Human coronavirus
SLTNIQRDW

SEQ ID NO: 262 - protein, 8 aa, Human coronavirus
SSLPTTQL

SEQ ID NO: 263 - protein, 20 aa, Human coronavirus
HNLWRVAKRFGENVTSQWRC

SEQ ID NO: 264 - protein, 9 aa, Human coronavirus
GLYGSGYLR

SEQ ID NO: 265 - protein, 4 aa, Human coronavirus
WSLA

SEQ ID NO: 266 - protein, 13 aa, Human coronavirus
QHSLVPTTRNVPG

SEQ ID NO: 267 - protein, 7 aa, Human coronavirus
CLVDFYD

SEQ ID NO: 268 - protein, 32 aa, Human coronavirus
FQCAKTHWRSSKLACCWSCHARHSFEVDCRCC

SEQ ID NO: 269 - protein, 15 aa, Human coronavirus
HSSLHFYNSETWRSI

SEQ ID NO: 270 - protein, 5 aa, Human coronavirus
CVSML

SEQ ID NO: 271 - protein, 13 aa, Human coronavirus
WSSDWYIHCCNAP

SEQ ID NO: 272 - protein, 9 aa, Human coronavirus
GFLSVWFLW

SEQ ID NO: 273 - protein, 7 aa, Human coronavirus
CWLHQGG

SEQ ID NO: 274 - protein, 13 aa, Human coronavirus
CDQFLLHASNGTC

SEQ ID NO: 275 - protein, 8 aa, Human coronavirus
WYTYRFSI

SEQ ID NO: 276 - protein, 9 aa, Human coronavirus
WYYVWCLYG

SEQ ID NO: 277 - protein, 14 aa, Human coronavirus
TSAPSSVNRQILQC

SEQ ID NO: 278 - protein, 10 aa, Human coronavirus
CSSLALRSNT

SEQ ID NO: 279 - protein, 8 aa, Human coronavirus
WLRLVCKT

SEQ ID NO: 280 - protein, 4 aa, Human coronavirus
CCFF

SEQ ID NO: 281 - protein, 8 aa, Human coronavirus
MGSCQPIH

SEQ ID NO: 282 - protein, 7 aa, Human coronavirus
ICWHSIR

SEQ ID NO: 283 - protein, 10 aa, Human coronavirus
HVSCQNRRCY

SEQ ID NO: 284 - protein, 26 aa, Human coronavirus
TAALCDPTTVYWVPGKANPWQYHVGR

SEQ ID NO: 285 - protein, 38 aa, Human coronavirus
YADYGCGYAEWCEKSYIWYCALVVCDPCLNLCDNLTSH

SEQ ID NO: 286 - protein, 8 aa, Human coronavirus
IYFVELLV

SEQ ID NO: 287 - protein, 21 aa, Human coronavirus
DYSHTVVPTLICDYGLRYVVG

SEQ ID NO: 288 - protein, 44 aa, Human coronavirus
TQTHLFDTFLVACGYLFDLCKHSLRAHYSHFVSADCSCKLACPH

SEQ ID NO: 289 - protein, 8 aa, Human coronavirus
CLYAHYTY

SEQ ID NO: 290 - protein, 5 aa, Human coronavirus
YWCLH

SEQ ID NO: 291 - protein, 18 aa, Human coronavirus
YVTCISHCSEEIVQPITF

SEQ ID NO: 292 - protein, 15 aa, Human coronavirus
LCVSIVQWCNVVVHL

SEQ ID NO: 293 - protein, 18 aa, Human coronavirus
HWRSLKPHCLSGFCHYTH

SEQ ID NO: 294 - protein, 59 aa, Human coronavirus
LYDYSLCYCQPCKSLHLCHLCLLTTAYTCVSGSEDDTFIIHMFRFHVYLLFWCLLSFEP

SEQ ID NO: 295 - protein, 6 aa, Human coronavirus
STYGCL

SEQ ID NO: 296 - protein, 11 aa, Human coronavirus
GLNTRVQIHDC

SEQ ID NO: 297 - protein, 5 aa, Human coronavirus
QSNCT

SEQ ID NO: 298 - protein, 10 aa, Human coronavirus
KFLGGYGSEL

SEQ ID NO: 299 - protein, 17 aa, Human coronavirus
VNRYWRYTLYKGCCYAV

SEQ ID NO: 300 - protein, 4 aa, Human coronavirus
TYRS

SEQ ID NO: 301 - protein, 17 aa, Human coronavirus
MHICGSPLCAPTVTLRG

SEQ ID NO: 302 - protein, 6 aa, Human coronavirus
GLGFLC

SEQ ID NO: 303 - protein, 8 aa, Human coronavirus
YIGSNRPQ

SEQ ID NO: 304 - protein, 17 aa, Human coronavirus
GFREIRKSLCYFNDFFW

SEQ ID NO: 305 - protein, 7 aa, Human coronavirus
RTSSYSF

SEQ ID NO: 306 - protein, 8 aa, Human coronavirus
VFTLSYLC

SEQ ID NO: 307 - protein, 15 aa, Human coronavirus
VGSCAESLSGSYGLW

SEQ ID NO: 308 - protein, 6 aa, Human coronavirus
HLTTSS

SEQ ID NO: 309 - protein, 6 aa, Human coronavirus
GFAEGC

SEQ ID NO: 310 - protein, 4 aa, Human coronavirus
GSGP

SEQ ID NO: 311 - protein, 5 aa, Human coronavirus
VRTYG

SEQ ID NO: 312 - protein, 7 aa, Human coronavirus
SGYDFYV

SEQ ID NO: 313 - protein, 4 aa, Human coronavirus
ASTC

SEQ ID NO: 314 - protein, 18 aa, Human coronavirus
RQESKNCQCYANYVVWYD

SEQ ID NO: 315 - protein, 7 aa, Human coronavirus
EARQRCS

SEQ ID NO: 316 - protein, 4 aa, Human coronavirus
WYHF

SEQ ID NO: 317 - protein, 6 aa, Human coronavirus
EWLYTS

SEQ ID NO: 318 - protein, 8 aa, Human coronavirus
CHPTVCFK

SEQ ID NO: 319 - protein, 6 aa, Human coronavirus
TSRCNS

SEQ ID NO: 320 - protein, 13 aa, Human coronavirus
LHRLESGSHISLA

SEQ ID NO: 321 - protein, 16 aa, Human coronavirus
LRWGFVGHYSYKQCGQ

SEQ ID NO: 322 - protein, 8 aa, Human coronavirus
VFRCCRQQ

SEQ ID NO: 323 - protein, 11 aa, Human coronavirus
KFNMATCFRMH

SEQ ID NO: 324 - protein, 6 aa, Human coronavirus
GIHFCR

SEQ ID NO: 325 - protein, 18 aa, Human coronavirus
DQTFRSKNHGCVCGSRAN

SEQ ID NO: 326 - protein, 11 aa, Human coronavirus
FLSLLRTCAGS

SEQ ID NO: 327 - protein, 7 aa, Human coronavirus
NADGSSF

SEQ ID NO: 328 - protein, 8 aa, Human coronavirus
CLSQMGAC

SEQ ID NO: 329 - protein, 22 aa, Human coronavirus
GRICQCRATTSLQILDCGTKRT

SEQ ID NO: 330 - protein, 7 aa, Human coronavirus
NPISLFC

SEQ ID NO: 331 - protein, 15 aa, Human coronavirus
QPSSRASVRAHCCDC

SEQ ID NO: 332 - protein, 5 aa, Human coronavirus
IASWF

SEQ ID NO: 333 - protein, 5 aa, Human coronavirus
HRVCL

SEQ ID NO: 334 - protein, 7 aa, Human coronavirus
FLGVVTC

SEQ ID NO: 335 - protein, 20 aa, Human coronavirus
SSKSLSRFRQCGRCPIDKLC

SEQ ID NO: 336 - protein, 4 aa, Human coronavirus
DAYS

SEQ ID NO: 337 - protein, 9 aa, Human coronavirus
NWYRYSYIC

SEQ ID NO: 338 - protein, 5 aa, Human coronavirus
TREYS

SEQ ID NO: 339 - protein, 20 aa, Human coronavirus
SRDLWWSFSVSLLPCAYRTS

SEQ ID NO: 340 - protein, 5 aa, Human coronavirus
CLWCL

SEQ ID NO: 341 - protein, 10 aa, Human coronavirus
VCPNPCSVCP

SEQ ID NO: 342 - protein, 11 aa, Human coronavirus
PCGILFVKYPL

SEQ ID NO: 343 - protein, 12 aa, Human coronavirus
CLSILDWIWVQL

SEQ ID NO: 344 - protein, 7 aa, Human coronavirus
ASSTAPI

SEQ ID NO: 345 - protein, 2699 aa, Human coronavirus
RFQFFKRVRGSIVNARIEPCSSGLSTDVVFRAFDICNYKAKVAGIGKYYKTNTCRFVELDDQGHHLDSYFVVKRHTMENYELEKHCYDLLRDCDAVAPHDFFIFDVDKVKTPHIVRQRLTEYTMMDLVYALRHFDQNSEVLKAILVKYGCCDVTYFENKLWFDFVENPSVIGVYHKLGERVRQAILNTVKFCDHMVKAGLVGVLTLDNQDLNGKWYDFGDFVITQPGSGVAIVDSYYSYLMPVLSMTDCLAAETHRDCDFNKPLIEWPLTEYDFTDYKVQLFEKYFKYWDQTYHANCVNCTDDRCVLHCANFNVLFAMTMPKTCFGPIVRKIFVDGVPFVVSCGYHYKELGLVMNMDVSLHRHRLSLKELMMYAADPAMHIASSNAFLDLRTSCFSVAALTTGLTFQTVRPGNFNQDFYDFVVSKGFFKEGSSVTLKHFFFAQDGNAAITDYNYYSYNLPTMCDIKQMLFCMEVVNKYFEIYDGGCLNASEVVVNNLDKSAGHPFNKFGKARVYYESMSYQEQDELFAMTKRNVIPTMTQMNLKYAISAKNRARTVAGVSILSTMTNRQYHQKMLKSMAATRGATCVIGTTKFYGGWDFMLKTLYKDVDNPHLMGWDYPKCDRAMPNMCRIFASLILARKHGTCCTTRDRFYRLANECAQVLSEYVLCGGGYYVKPGGTSSGDATTAYANSVFNILQATTANVSALMGANGNKIVDKEVKDMQFDLYVNVYRSTSPDPKFVDKYYAFLNKHFSMMILSDDGVVCYNSDYAAKGYIAGIQNFKETLYYQNNVFMSEAKCWVETDLKKGPHEFCSQHTLYIKDGDDGYFLPYPDPSRILSAGCFVDDIVKTDGTLMVERFVSLAIDAYPLTKHEDIEYQNVFWVYLQYIEKLYKDLTGHMLDSYSVMLCGDNSAKFWEEAFYRDLYSSPTTLQAVGSCVVCHSQTSLRCGTCIRRPFLCCKCCYDHVIATPHKMVLSVSPYVCNAPGCGVSDVTKLYLGGMSYFCVDHRPVCSFPLCANGLVFGLYKNMCTGSPSIVEFNRLATCDWTESGDYTLANTTTEPLKLFAAETLRATEEASKQSYAIATIKEIVGERQLLLVWEAGKSKPPLNRNYVFTGYHITKNSKVQLGEYIFERIDYSDAVSYKSSTTYKLTVGDIFVLTSHSVATLTAPTIVNQERYVKITGLYPTITVPEEFASHVANFQKSGYSKYVTVQGPPGTGKSHFAIGLAIYYPTARVVYTACSHAAVDALCEKAFKYLNIAKCSRIIPAKARVECYDRFKVNETNSQYLFSTINALPETSADILVVDEVSMCTNYDLSIINARIKAKHIVYVGDPAQLPAPRTLLTRGTLEPENFNSVTRLMCNLGPDIFLSMCYRCPKEIVSTVSALVYNNKLLAKKELSGQCFKILYKGNVTHDASSAINRPQLTFVKNFITANPAWSKAVFISPYNSQNAVSRSMLGLTTQTVDSSQGSEYQYVIFCQTADTAHANNINRFNVAITRAQKGILCVMTSQALFESLEFTELSFTNYKLQSQIVTGLFKDCSRETSGLSPAYAPTYVSVDDKYKTSDELCVNLNLPANVPYSRVISRMGFKLDATVPGYPKLFITREEAVRQVRSWIGFDVEGAHASRNACGTNVPLQLGFSTGVNFVVQPVGVVDTEWGNMLTGIAARPPPGEQFKHLVPLMHKGAAWPIVRRRIVQMLSDTLDKLSDYCTFVCWAHGFELTSASYFCKIGKEQKCCMCNRRAAAYSSPLQSYACWTHSCGYDYVYNPFFVDVQQWGYVGNLATNHDRYCSVHQGAHVASNDAIMTRCLAIHSCFIERVDWDIEYPYISHEKKLNSCCRIVERNVVRAALLAGSFDKVYDIGNPKGIPIVDDPVVDWHYFDAQPLTRKVQQLFYTEDMASRFADGLCLFWNCNVPKYPNNAIVCRFDTRVHSEFNLPGCDGGSLYVNKHAFHTPAYDVSAFRDLKPLPFFYYSTTPCEVHGNGSMIEDIDYVPLKSAVCITACNLGGAVCRKHATEYREYMEAYNLVSASGFRLWCYKTFDIYNLWSTFTKVQGLENIAFNVVKQGHFIGVEGELPVAVVNDKIFTKSGVNDICMFENKTTLPTNIAFELYAKRAVRSHPDFKLLHNLQADICYKFVLWDYERSNIYGTATIGVCKYTDIDVNSALNICFDIRDNCSLEKFMSTPNAIFISDRKIKKYPCMVGPDYAYFNGAIIRDSDVVKQPVKFYLYKKVNNEFIDPTECIYTQSRSCSDFLPLSDMEKDFLSFDSDVFIKKYGLENYAFEHVVYGDFSHTTLGGLHLLIGLYKKQQEGHIIMEEMLKGSSTIHNYFITETNTAAFKAVCSVIDLKLDDFVMILKSQDLGVVSKVVKVPIDLTMIEFMLWCKDGQVQTFYPRLQASADWKPGHAMPSLFKVQNVNLERCELANYKQSIPMPRGVHMNIAKYMQLCQYLNTCTLAVPANMRVIHFGAGSDKGIAPGTSVLRQWLPTDAIIIDNDLNEFVSDADITLFGDCVTVRVGQQVDLVISDMYDPTTKNVTGSNESKALFFTYLCNLINNNLALGGSVAIKITEHSWSVELYELMGKFAWWTVFCTNANASSSEGFLLGINYLGTIKENIDGGAMHANYIFWRNSTPMNLSTYSLFDLSKFQLKLKGTPVLQLKESQINELVISLLSQGKLLIRDNDTLSVSTDVLVNTYRKLR

SEQ ID NO: 346 - protein, 6 aa, Human coronavirus
CRARFC

SEQ ID NO: 347 - protein, 4 aa, Human coronavirus
VCLY

SEQ ID NO: 348 - protein, 6 aa, Human coronavirus
YTTDFL

SEQ ID NO: 349 - protein, 11 aa, Human coronavirus
RYYIPSRPYIF

SEQ ID NO: 350 - protein, 16 aa, Human coronavirus
HNYHLSRSFSLSGRPW

SEQ ID NO: 351 - protein, 20 aa, Human coronavirus
YVCLLCRTCYRHNSTKVVCS

SEQ ID NO: 352 - protein, 9 aa, Human coronavirus
LFSGRQTVC

SEQ ID NO: 353 - protein, 18 aa, Human coronavirus
WVCRPYRSSCQFHWHCYY

SEQ ID NO: 354 - protein, 21 aa, Human coronavirus
PIYQRYYTKNLPCFYAGFFSW

SEQ ID NO: 355 - protein, 4 aa, Human coronavirus
FLRW

SEQ ID NO: 356 - protein, 20 aa, Human coronavirus
NGPLLQSYSSSFARWMWHFT

SEQ ID NO: 357 - protein, 34 aa, Human coronavirus
SFLLYSRASLWKSLSCWQFLYFFCHLSHSCNRLF

SEQ ID NO: 358 - protein, 5 aa, Human coronavirus
WQLQS

SEQ ID NO: 359 - protein, 6 aa, Human coronavirus
CQSELF

SEQ ID NO: 360 - protein, 7 aa, Human coronavirus
LHLYVHL

SEQ ID NO: 361 - protein, 4 aa, Human coronavirus
HYRR

SEQ ID NO: 362 - protein, 22 aa, Human coronavirus
DFRVVWHYTNCSRCSPLLISVC

SEQ ID NO: 363 - protein, 15 aa, Human coronavirus
FVRRQYVSICHLACL

SEQ ID NO: 364 - protein, 14 aa, Human coronavirus
VLFYHSSQYSFYPK

SEQ ID NO: 365 - protein, 9 aa, Human coronavirus
KSLGCLLRI

SEQ ID NO: 366 - protein, 12 aa, Human coronavirus
TSTVNFPVGFFC

SEQ ID NO: 367 - protein, 11 aa, Human coronavirus
WLYTQSYRLWF

SEQ ID NO: 368 - protein, 8 aa, Human coronavirus
FVTTPLLI

SEQ ID NO: 369 - protein, 4 aa, Human coronavirus
ILRC

SEQ ID NO: 370 - protein, 21 aa, Human coronavirus
IWSLFSFVFRSKTFWLSCGTG

SEQ ID NO: 371 - protein, 13 aa, Human coronavirus
FFTSSVWHTSSGL

SEQ ID NO: 372 - protein, 11 aa, Human coronavirus
FQAFGFYQLQL

SEQ ID NO: 373 - protein, 11 aa, Human coronavirus
SYQIAFTFFCE

SEQ ID NO: 374 - protein, 8 aa, Human coronavirus
SNISSSNC

SEQ ID NO: 375 - protein, 15 aa, Human coronavirus
QLLFFTDFGLLFIPT

SEQ ID NO: 376 - protein, 7 aa, Human coronavirus
YEIRSQC

SEQ ID NO: 377 - protein, 8 aa, Human coronavirus
FCWSNIPV

SEQ ID NO: 378 - protein, 4 aa, Human coronavirus
TVLF

SEQ ID NO: 379 - protein, 11 aa, Human coronavirus
SHMFDFSDCSS

SEQ ID NO: 380 - protein, 5 aa, Human coronavirus
PYYYY

SEQ ID NO: 381 - protein, 4 aa, Human coronavirus
VQLY

SEQ ID NO: 382 - protein, 7 aa, Human coronavirus
QVLSSSF

SEQ ID NO: 383 - protein, 7 aa, Human coronavirus
STSVSER

SEQ ID NO: 384 - protein, 17 aa, Human coronavirus
SILTLCIHCPIHCVGRR

SEQ ID NO: 385 - protein, 6 aa, Human coronavirus
ETTIST

SEQ ID NO: 386 - protein, 7 aa, Human coronavirus
RWWLACC

SEQ ID NO: 387 - protein, 7 aa, Human coronavirus
WLNCCHD

SEQ ID NO: 388 - protein, 17 aa, Human coronavirus
AITDGLWYYSSIWYRHQ

SEQ ID NO: 389 - protein, 5 aa, Human coronavirus
CLPQA

SEQ ID NO: 390 - protein, 39 aa, Human coronavirus
HKNCLSIRQLRGIFPLWCFGPWCFSELHSCRCSTAALCL

SEQ ID NO: 391 - protein, 10 aa, Human coronavirus
CVPEFSWLLF

SEQ ID NO: 392 - protein, 10 aa, Human coronavirus
WQLLLFACLC

SEQ ID NO: 393 - protein, 7 aa, Human coronavirus
CSCFCHL

SEQ ID NO: 394 - protein, 7 aa, Human coronavirus
NPRYSIW

SEQ ID NO: 395 - protein, 17 aa, Human coronavirus
THFFYHVSILPFYAINA

SEQ ID NO: 396 - protein, 20 aa, Human coronavirus
TARFYIWPPSDTCWLCPRTC

SEQ ID NO: 397 - protein, 20 aa, Human coronavirus
FLFVRRGLQVASWSISLCSS

SEQ ID NO: 398 - protein, 12 aa, Human coronavirus
YSHTSQCALCSR

SEQ ID NO: 399 - protein, 8 aa, Human coronavirus
NALGIHCF

SEQ ID NO: 400 - protein, 5 aa, Human coronavirus
SSYSG

SEQ ID NO: 401 - protein, 5 aa, Human coronavirus
IKYTH

SEQ ID NO: 402 - protein, 19 aa, Human coronavirus
FFLWCDSGVHSDNHSESYC

SEQ ID NO: 403 - protein, 10 aa, Human coronavirus
TVRLQWFPEV

SEQ ID NO: 404 - protein, 25 aa, Human coronavirus
AITARVWPVLFQNKPGSPWCQFTPG

SEQ ID NO: 405 - protein, 19 aa, Human coronavirus
FVCEREKLSIISYHTRFWR

SEQ ID NO: 406 - protein, 14 aa, Human coronavirus
FDTSRTCFYIYWQS

SEQ ID NO: 407 - protein, 4 aa, Human coronavirus
GFAI

SEQ ID NO: 408 - protein, 5 aa, Human coronavirus
QSHYS

SEQ ID NO: 409 - protein, 8 aa, Human coronavirus
SWLYARLR

SEQ ID NO: 410 - protein, 10 aa, Human coronavirus
LHAARSSISS

SEQ ID NO: 411 - protein, 19 aa, Human coronavirus
SYLCSICGWLQSITSSYGC

SEQ ID NO: 412 - protein, 36 aa, Human coronavirus
YGSRVYFIFAWQHSRCWLDCWLILLCCYSICTEYLL

SEQ ID NO: 413 - protein, 20 aa, Human coronavirus
VKRCWHYSTGSFREPKAYCQ

SEQ ID NO: 414 - protein, 13 aa, Human coronavirus
SGSGSYANRLHYN

SEQ ID NO: 415 - protein, 20 aa, Human coronavirus
SFSEGSGCCEQQCTGSIQIS

SEQ ID NO: 416 - protein, 16 aa, Human coronavirus
YFWCYFRLYWRHHTTS

SEQ ID NO: 417 - protein, 12 aa, Human coronavirus
CSRTGRPNRQTY

SEQ ID NO: 418 - protein, 27 aa, Human coronavirus
WPFDNTKCFCCTAACSFRISCSFRSIG

SEQ ID NO: 419 - protein, 26 aa, Human coronavirus
VCQGTIQAFWILRSRHTYSVLCCKCP

SEQ ID NO: 420 - protein, 11 aa, Human coronavirus
WPLLHACWLLP

SEQ ID NO: 421 - protein, 11 aa, Human coronavirus
GCFCLWSLRCS

SEQ ID NO: 422 - protein, 5 aa, Human coronavirus
LYSPC

SEQ ID NO: 423 - protein, 4 aa, Human coronavirus
WLLY

SEQ ID NO: 424 - protein, 11 aa, Human coronavirus
VVIYWLVLLCT

SEQ ID NO: 425 - protein, 5 aa, Human coronavirus
AHYLP

SEQ ID NO: 426 - protein, 13 aa, Human coronavirus
VCCTTGDIPKHFY

SEQ ID NO: 427 - protein, 12 aa, Human coronavirus
PPSSSSRQFHRD

SEQ ID NO: 428 - protein, 5 aa, Human coronavirus
VFQKC

SEQ ID NO: 429 - protein, 4 aa, Human coronavirus
HQYT

SEQ ID NO: 430 - protein, 7 aa, Human coronavirus
FWFPNTD

SEQ ID NO: 431 - protein, 17 aa, Human coronavirus
YYITRSYLRDVVSSTSC

SEQ ID NO: 432 - protein, 5 aa, Human coronavirus
VLHRP

SEQ ID NO: 433 - protein, 47 aa, Human coronavirus
RAWQLYLLQQMAVVHLAWFHCWACCLSSMRLLHTVLHWLWHKLYGKT

SEQ ID NO: 434 - protein, 9 aa, Human coronavirus
IRGIRPRAA

SEQ ID NO: 435 - protein, 113 aa, Human coronavirus
GSCSLINELLMRVQRPPTLLLVFSLSLLVTASSKPLYVPEHCQNYSGCMLRACIKTAQADTAGLYTNFRIDVPSAESTGTQSVSVDLESTSTHDGPTEHVTSVNLFDVGYSVN

SEQ ID NO: 436 - protein, 37 aa, Human coronavirus
RTLWITCLCLIKFGRSTLTHRILLVCTSLNPQLSIHL

SEQ ID NO: 437 - protein, 291 aa, Human coronavirus
LALHCTLCCGTVSYPLLVILNLLLILQKLWPNRTQLSESLGCYIRMEESLMDVPSTSGTQVYSRKARKRSHSPTKKLRYVKRRFSLLRHEDLSVIVQPTHYVRVTFSDPNMWYLRSGHHLHSVHNWLKPYGGQPVSEYHITLALLNLTDEDLARDFSPIALFLRNVRFELHEFALLRKTLVLNASEIYCANIHRFKPVYRVNTAIPTIKDWLLVQGFSLYHSGLPLHMSISKLHALDDVTRNYIITMPCFRTYPQQMFVTPLAVDVVSIRSSNQGNKQIVHSYPILHHPGF

SEQ ID NO: 438 - protein, 109 aa, Human coronavirus
RTMAFSASLFKPVQLVPVSPAFHRIESTDSIVFTYIPASGYVAALAVNVCLIPLLLLLRQDTCRRSIIRTMVLYFLVLYNFLLAIVLVNGVHYPTGSCLIAFLVILIIL

SEQ ID NO: 439 - protein, 116 aa, Human coronavirus
FVDRIRFCLMLNSYIPLFDMRSHFIRVSTVSSHGMVPVIHTKPLFIRNFDQRCSCSRCFYLHSSTYIECTYISRFSKISLVSVTDFSLNGNVSTVFVPATRDSVPLHIIAPSSLIV

SEQ ID NO: 440 - protein, 107 aa, Human coronavirus
AALRYYGSRVEANPLVSLWTYGKRTMLPFVQERIGLFIVNFFIFTVVCAITLLVCMAFLTATRLCVQCMTGFNTLLVQPALYLYNTGRSVYVKFQDSKPPLPPDEWV

SEQ ID NO: 441 - protein, 4 aa, Human coronavirus
RTPS

SEQ ID NO: 442 - protein, 20 aa, Human coronavirus
RNSLRRRLLPLLKTGTLHGP

SEQ ID NO: 443 - protein, 13 aa, Human coronavirus
LLSYYSMDTHPVV

SEQ ID NO: 444 - protein, 30 aa, Human coronavirus
LSMSLKCLFYGSYGHLPWRYQYLAPFIQLI

SEQ ID NO: 445 - protein, 4 aa, Human coronavirus
SLAL

SEQ ID NO: 446 - protein, 5 aa, Human coronavirus
QLFQL

SEQ ID NO: 447 - protein, 13 aa, Human coronavirus
CGFPTLCRVSGCL

SEQ ID NO: 448 - protein, 15 aa, Human coronavirus
ELDHGGHSILRLIAF

SEQ ID NO: 449 - protein, 13 aa, Human coronavirus
TFHLVVQLSYVHS

SEQ ID NO: 450 - protein, 5 aa, Human coronavirus
RTLPV

SEQ ID NO: 451 - protein, 31 aa, Human coronavirus
PMATSKWLACISVLVTTTDFLMKSPWPNPMC

SEQ ID NO: 452 - protein, 70 aa, Human coronavirus
SGKATELIPALPFTIDIRQVITGVRLLRRILNLHCFELRLFSKSILIDFNESQFHCYGIPCCTSCCFLCR

SEQ ID NO: 453 - protein, 9 aa, Human coronavirus
YNKYKPISR

SEQ ID NO: 454 - protein, 8 aa, Human coronavirus
SKTTSCTK

SEQ ID NO: 455 - protein, 26 aa, Human coronavirus
HCLLVHWAYPTRESPSYLSTWAGCTS

SEQ ID NO: 456 - protein, 19 aa, Human coronavirus
CQFYPCAKCWVLAETGQKN

SEQ ID NO: 457 - protein, 5 aa, Human coronavirus
YREWN

SEQ ID NO: 458 - protein, 24 aa, Human coronavirus
ATGSQVVLLLHWNWTRSSTPIPGC

SEQ ID NO: 459 - protein, 7 aa, Human coronavirus
GWHRLGP

SEQ ID NO: 460 - protein, 4 aa, Human coronavirus
RWRH

SEQ ID NO: 461 - protein, 10 aa, Human coronavirus
CSFNFWDAEP

SEQ ID NO: 462 - protein, 11 aa, Human coronavirus
FSYCYTIRARY

SEQ ID NO: 463 - protein, 4 aa, Human coronavirus
KLPH

SEQ ID NO: 464 - protein, 5 aa, Human coronavirus
GDWRQ

SEQ ID NO: 465 - protein, 7 aa, Human coronavirus
SIIFKSL

SEQ ID NO: 466 - protein, 8 aa, Human coronavirus
LKQKLFQI

SEQ ID NO: 467 - protein, 25 aa, Human coronavirus
FTRFKIRKLYPRHFSRSIWNRSSRR

SEQ ID NO: 468 - protein, 4 aa, Human coronavirus
STLP

SEQ ID NO: 469 - protein, 8 aa, Human coronavirus
SSEQTTSP

SEQ ID NO: 470 - protein, 13 aa, Human coronavirus
VWQSKAIAAKSNH

SEQ ID NO: 471 - protein, 6 aa, Human coronavirus
ERCCCC

SEQ ID NO: 472 - protein, 30 aa, Human coronavirus
DAPQAHFHQKFQHGASFWSSRTRRPPGKLW

SEQ ID NO: 473 - protein, 4 aa, Human coronavirus
SSIE

SEQ ID NO: 474 - protein, 8 aa, Human coronavirus
GPTLAPNC

SEQ ID NO: 475 - protein, 14 aa, Human coronavirus
ACSYSQCFYGYVAI

SEQ ID NO: 476 - protein, 6 aa, Human coronavirus
TYPSEQ

SEQ ID NO: 477 - protein, 14 aa, Human coronavirus
SWQPCVLPSVQWSH

SEQ ID NO: 478 - protein, 7 aa, Human coronavirus
PKESQLQ

SEQ ID NO: 479 - protein, 5 aa, Human coronavirus
VVGAS

SEQ ID NO: 480 - protein, 6 aa, Human coronavirus
CLQNLP

SEQ ID NO: 481 - protein, 17 aa, Human coronavirus
EGKETKGTKRRINRPNV

SEQ ID NO: 482 - protein, 9 aa, Human coronavirus
TSKGAACAR

SEQ ID NO: 483 - protein, 17 aa, Human coronavirus
HHSAHSHPSKCSAWSND

SEQ ID NO: 484 - protein, 38 aa, Human coronavirus
LVSLKVTRSRQSFVFGNPISPSLVHSCTEWNHVVITVQ

SEQ ID NO: 485 - protein, 7 aa, Human coronavirus
GNYNPFN

SEQ ID NO: 486 - protein, 36 aa, Human coronavirus
LCFIKVCSCRENVKDCHLCLIASEQCPPGRALQCEM

SEQ ID NO: 487 - protein, 11 aa, Human coronavirus
IKNSYYSIRLG

SEQ ID NO: 488 - protein, 10 aa, Human coronavirus
LDDLQKKKKK

SEQ ID NO: 489 - DNA, 30124 bp, Human coronavirus; identical to SEQ ID NO: 14
  CDS (2)..(30124)

SEQ ID NO: 490 - protein, 26 aa, Human coronavirus
IAWLSHFPSFSCRTLILTNLNKSPVV

SEQ ID NO: 491 - protein, 31 aa, Human coronavirus
RIVALVWWDCGINLPAHLGSGHMLNTGYNSN

SEQ ID NO: 492 - protein, 5 aa, Human coronavirus
ILFFS

SEQ ID NO: 493 - protein, 4415 aa, Human coronavirus
SVVSLVRLGHNTRFRPVRGNSGHIMSFVAGVTAQGARGTYRAALNSEKHQDHVSLTVPLCGSGNLVEKLSPWFMDGENAYEVVKAMLLKKEPLLYVPIRLAGHTRHLPGPRVYLVERLIACENPFMVNQLAYSSSANGSLVGTTLQGKPIGMFFPYDIELVTGKQNILLRKYGRGGYHYTPFHYERDNTSCPEWMDDFEADPKGKYAQNLLKKLIGGDVTPVDQYMCGVDGKPISAYAFLMAKDGITKLADVEADVAARADDEGFITLKNNLYRLVWHVERKDVPYPKQSIFTINSVVQKDGVENTPPHYFTLGCKILTLTPRNKWSGVSDLSLKQKLLYTFYGKESLENPTYIYHSAFIECGSCGNDSWLTGNAIQGFACGCGASYTANDVEVQSSGMIKPNALLCATCPFAKGDSCSSNCKHSVAQLVSYLSERCNVIADSKSFTLIFGGVAYAYFGCEEGTMYFVPRAKSVVSRIGDSIFTGCTGSWNKVTQIANMFLEQTQHSLNFVGEFVVNDVVLAILSGTTTNVDKIRQLLKGVTLDKLRDYLADYDVAVTAGPFMDNAINVGGTGLQYAAITAPYVVLTGLGESFKKVATIPYKVCNSVKDTLAYYAHSVLYRVFPYDMDSGVSSFSELLFDCVDLSVASTYFLVRILQDKTGDFMSTIITSCQTAVSKLLDTCFEATEATFNFLLDLAGLFRIFLRNAYVYTSQGFVVVNGKVSTLVKQVLDLLNKGMQLLHTKVSWAGSKIIAVIYSGRESLIFPSGTYYCVTTKAKSVQQDLDVILPGEFSKKQLGLLQPTDNSTTVSVTVSSNMVETVVGQLEQTNMHSPDVIVGDYVIISEKLFVRSKEEDGFAFYPACTNGHAVPTLFRLKGGAPSKKVAFGGDQVHEVAAVRSVTVEYNIHAVLDTLLASSSLRTFVVDKSLSIEEFADVVKEQVSDLLVKLLRGMPIPDFDLDDFIDAPCYCFNAEGDASWSSTMIFSLHPVECDEECSEVEASDLEEGESECISETSTEQVDVSHETSDDEWAAAVDEAFPLDEAEDVTESVQEEAQPVEVPVEDIAQVVIADTLQETPVVPDTVEVPPQVVKLPSAPQTIQPEVKEVAPVYEADTEQTQNVTVKPKRLRKKRNVDPLSNFEHKVITECVTIVLGDAIQVAKCYGESVLVNAANTHLKHGGGIAGAINAASKGAVQKESDEYILAKGPLQVGDSVLLQGHSLAKNILHVVGPDARAKQDVSLLSKCYKAMNAYPLVVTPLVSAGIFGVKPAVSFDYLIREAKTRVLVVVNSQDVYKSLTIVDIPQSLTFSYDGLRGAIRKAKDYGFTVFVCTDNSANTKVLRNKGVDYTKKFLTVDGVQYYCYTSKDTLDDILQQANKSVGIISMPLGYVSHGLDLMQAGSVVRRVNVPYVCLLANKEQEAILMSEDVKLNPSEDFIKHVRTNGGYNSWHLVEGELLVQDLRLNKLLHWSDQTICYKDSVFYVVKNSTAFPFETLSACRAYLDSRTTQQLTIEVLVTVDGVNFRTVVLNNKNTYRSQLGCVFFNGADISDTIPDEKQNGHSLYLADNLTADETKALKELYGPVDPTFLHRFYSLKAAVHGWKMVVCDKVRSLKLSDNNCYLNAVIMTLDLLKDIKFVIPALQHAFMKHKGGDSTDFIALIMAYGNCTFGAPDDASRLLHTVLAKAELCCSARMVWREWCNVCGIKDVVLQGLKACCYVGVQTVEDLRARMTYVCQCGGERHRQLVEHTTPWLLLSGTPNEKLVTTSTAPDFVAFNVFQGIETAVGHYVHARLKGGLILKFDSGTVSKTSDWKCKVTDVLFPGQKYSSDCNVVRYSLDGNFRTEVDPDLSAFYVKDGKYFTSEPPVTYSPATILAGSVYTNSCLVSSDGQPGGDAISLSFNNLLGFDSSKPVTKKYTYSFLPKEDGDVLLAEFDTYDPIYKNGAMYKGKPILWVNKASYDTNLNKFNRASLRQIFDVAPIELENKFTPLSVESTPVEPPTVDVVALQQEMTIVKCKGLNKPFVKDNVSFVADDSGTPVVEYLSKEDLHTLYVDPKYQVIVLKDNVLSSMLRLHTVESGDINVVAASGSLTRKVKLLFRASFYFKEFATRTFTATTAVGSCIKSVVRHLGVTKGILTGCFSFAKMLFMLPLAYFSDSKLGTTEVKVSALKTAGVVTGNVVKQCCTAAVDLSMDKLRRVDWKSTLRLLLMLCTTMVLLSSVYHLYVFNQVLSSDVMFEDAQGLKKFYKEVRAYLGISSACDGLASAYRANSFDVPTFCANRSAMCNWCLISQDSITHYPALKMVQTHLSHYVLNIDWLWFAFETGLAYMLYTSAFNWLLLAGTLHYFFAQTSIFVDWRSYNYAVSSAFWLFTHIPMAGLVRMYNLLACLWLLRKFYQHVINGCKDTACLLCYKRNRLTRVEASTVVCGGKRTFYITANGGISFCRRHNWNCVDCDTAGVGNTFICEEVANDLTTALRRPINATDRSHYYVDSVTVKETVVQFNYRRDGQPFYERFPLCAFTNLDKLKFKEVCKTTTGIPEYNFIIYDSSDRGQESLARSACVYYSQVLCKSILLVDSSLVTSVGDSSEIATKMFDSFVNSFVSLYNVTRDKLEKLISTARDGVRRGDNFHSVLTTFIDAARGPAGVESDVETNEIVDSVQYAHKHDIQITNESYNNYVPSYVKPDSVSTSDLGSLIDCNAASVNQIVLRNSNGACIWNAAAYMKLSDALKRQIRIACRKCNLAFRLTTSKLRANDNILSVRFTANKIVGGAPTWFNALRDFTLKGYVLATIIVFLCAVLMYLCLPTFSMAPVEFYEDRILDFKVLDNGIIRDVNPDDKCFANKHRSFTQWYHEHVGGVYDNSITCPLTVAVIAGVAGARIPDVPTTLAWVNNQIIFFVSRVFANTGSVCYTPIDEIPYKSFSDSGCILPSECTMFRDAEGRMTPYCHDPTVLPGAFAYSQMRPHVRYDLYDGNMFIKFPEVVFESTLRITRTLSTQYCRFGSCEYAQEGVCITTNGSWAIFNDHHLNRPGVYCGSDFIDIVRRLAVSLFQPITYFQLTTSLVLGIGLCAFLTLLFYYINKVKRAFADYTQCAVIAVVAAVLNSLCICFVTSIPLCIVPYTALYYYATFYFTNEPAFIMHVSWYIMFGPIVPIWMTCVYTVAMCFRHFFWVLAYFSKKHVEVFTDGKLNCSFQDAASNIFVINKDTYAALRNSLTNDAYSRFLGLFNKYKYFSGAMETAAYREAAACHLAKALQTYSETGSDLLYQPPNCSITSGVLQSGLVKMSHPSGDVEACMVQVTCGSMTLNGLWLDNTVWCPRHVMCPADQLSDPNYDALLISMTNHSFSVQKHIGAPANLRVVGHAMQGTLLKLTVDVANPSTPAYTFTTVKPGAAFSVLACYNGRPTGTFTVVMRPNYTIKGSFLCGSCGSVGYTKEGSVINFCYMHQMELANGTHTGSAFDGTMYGAFMDKQVHQVQLTDKYCSVNVVAWLYAAILNGCAWFVKPNRTSVVSFNEWALANQFTEFVGTQSVDMLAVKTGVAIEQLLYAIQQLYTGFQGKQILGSTMLEDEFTPEDVNMQIMGVVMQSGVRKVTYGTAHWLFATLVSTYVIILQATKFTLWNYLFETIPTQLFPLLFVTMAFVMLLVKHKHTFLTLFLLPVAICLTYANIVYEPTTPISSALIAVANWLAPTNAYMRTTHTDIGVYISMSLVLVIVVKRLYNPSLSNFALALCSGVMWLYTYSIGEASSPIAYLVFVTTLTSDYTITVFVTVNLAKVCTYAIFAYSPQLTLVFPEVKMILLLYTCLGFMCTCYFGVFSLLNLKLRAPMGVYDFKVSTQEFRFMTANNLTAPRNSWEAMALNFKLIGIGGTPCIKVAAMQSKLTDLKCTSVVLLSVLQQLHLEANSRAWAFCVKCHNDILAATDPSEAFEKFVSLFATLMTFSGNVDLDALASDIFDTPSVLQATLSEFSHLATFAELEAAQKAYQEAMDSGDTSPQVLKALQKAVNIAKNAYEKDKAVARKLERMADQAMTSMYKQARAEDKKAKIVSAMQTMLFGMIKKLDNDVLNGIISNARNGCIPLSVIPLCASNKLRVVIPDFTVWNQVVTYPSLNYAGALWDITVINNVDNEIVKSSDVVDSNENLTWPLVLECTRASTSAVKLQNNEIKPSGLKTMVVSAGQEQTNCNTSSLAYYEPVQGRKMLMALLSDNAYLKWARVEGKDGFVSVELQPPCKFLIAGPKGPEIRYLYFVKNLNNLHRGQVLGHIAATVRLQAGSNTEFASNSSVLSLVNFTVDPQKAYLDFVNAGGAPLTNCVKMLTPKTGTGIAISVKPESTADQETYGGASVCLYCRAHIEHPDVSGVCKYKGKFVQIPAQCVRDPVGFCLSNTPCNVCQYWIGYGCNCDSLRQAALPQSKDSNFLNESGVLL

SEQ ID NO: 494 - protein, 39 aa, Human coronavirus
NPVQVVCPLMSSLGHLTSATIRLRLLVLENTTRLILVGL

SEQ ID NO: 495 - protein, 6 aa, Human coronavirus
MTKGII

SEQ ID NO: 496 - protein, 15 aa, Human coronavirus
TPILSLRGILWRIMN

SEQ ID NO: 497 - protein, 13 aa, Human coronavirus
RSTVTTCYVTVML

SEQ ID NO: 498 - protein, 9 aa, Human coronavirus
LPMISSSLM

SEQ ID NO: 499 - protein, 12 aa, Human coronavirus
TKLKHLILYVSV

SEQ ID NO: 500 - protein, 4 aa, Human coronavirus
LSTL

SEQ ID NO: 501 - protein, 6 aa, Human coronavirus
WILYMP

SEQ ID NO: 502 - protein, 13 aa, Human coronavirus
GTLIKIAKCLRLS

SEQ ID NO: 503 - protein, 39 aa, Human coronavirus
SMVAVMLPTLKINSGLILLKIPVLLVFIINLENVYAKLS

SEQ ID NO: 504 - protein, 13 aa, Human coronavirus
TLLNFVTTWSRLV

SEQ ID NO: 505 - protein, 5 aa, Human coronavirus
SVCSH

SEQ ID NO: 506 - protein, 15 aa, Human coronavirus
TTRTLMASGMILVTS

SEQ ID NO: 507 - protein, 7 aa, Human coronavirus
SLNLVQE

SEQ ID NO: 508 - protein, 7 aa, Human coronavirus
LIATILI

SEQ ID NO: 509 - protein, 5 aa, Human coronavirus
CLCSQ

SEQ ID NO: 510 - protein, 71 aa, Human coronavirus
PIVWPLRHIGIVILINHSLSGHLLSMILLIIRYNSLRSTLNIGIRRITQIALIVLMTVVCYIVLISMYCLL

SEQ ID NO: 511 - protein, 9 aa, Human coronavirus
PCLRLVSDP

SEQ ID NO: 512 - protein, 11 aa, Human coronavirus
SERSLLMACHL

SEQ ID NO: 513 - protein, 9 aa, Human coronavirus
YLVVITTKN

SEQ ID NO: 514 - protein, 15 aa, Human coronavirus
IWMLVSIDIGSLLRS

SEQ ID NO: 515 - protein, 18 aa, Human coronavirus
CMPLIQPCTLPPLTLFLI

SEQ ID NO: 516 - protein, 13 aa, Human coronavirus
GHHVLVSLHLQLV

SEQ ID NO: 517 - protein, 29 aa, Human coronavirus
LFKLCGLAILTKTSMISWYLKVSLRRALQ

SEQ ID NO: 518 - protein, 40 aa, Human coronavirus
RSNIFSLLKMVMLLLQIIITILIICLLCVTSNKCCSAWKL

SEQ ID NO: 519 - protein, 21 aa, Human coronavirus
TSTSKSMTVVVLMLLKWLLII

SEQ ID NO: 520 - protein, 31 aa, Human coronavirus
TRVLAILLISLAKLVSIMRACLTRSKMNFLP

SEQ ID NO: 521 - protein, 8 aa, Human coronavirus
QSVTSFLP

SEQ ID NO: 522 - protein, 21 aa, Human coronavirus
NMLLVLRIELALLQACPYLAQ

SEQ ID NO: 523 - protein, 71 aa, Human coronavirus
LIASTIRKCLSPWLQLVERLASLVLQSSTVAGISCLKHCTKMLIIRILWVGITLSVIELCLICVESSLHSY

SEQ ID NO: 524 - protein, 24 aa, Human coronavirus
LVNMALVVLQGTDFIAWQMSVLRC

SEQ ID NO: 525 - protein, 91 aa, Human coronavirus
ANMFYVVVVTTSNLEVPVAEMPPLHMPIVSLTFCRRQLLMSVHLWVLMATRLLTKKLKTCSLICMSMFTGALAQTPNLLINTMLFLISTFL

SEQ ID NO: 526 - protein, 48 aa, Human coronavirus
YCLMTVSFAIIVIMQLRVTLLEYRILRKRCIIRTMSLCLKLNAGWKPI

SEQ ID NO: 527 - protein, 38 aa, Human coronavirus
RKGHMNSVHSIRFILRMATMVTSFLIQTLQEFCLPVAL

SEQ ID NO: 528 - protein, 11 aa, Human coronavirus
MISLRLTVHSW

SEQ ID NO: 529 - protein, 7 aa, Human coronavirus
SGLCLWL

SEQ ID NO: 530 - protein, 10 aa, Human coronavirus
MLTLSQSMKI

SEQ ID NO: 531 - protein, 12 aa, Human coronavirus
NTRMYSGSTYSI

SEQ ID NO: 532 - protein, 78 aa, Human coronavirus
KNCIKTLQDTCLTVILSCYVVIILLSFGKRHSIEISIVRLPLCRLSVHALYAIHRLPYAVGHASVDHFSAVNAAMIML

SEQ ID NO: 533 - protein, 29 aa, Human coronavirus
QLHIRWFCLFLLTFVMPLVVAFQTLLSYI

SEQ ID NO: 534 - protein, 4 aa, Human coronavirus
ATFV

SEQ ID NO: 535 - protein, 29 aa, Human coronavirus
IIDLCVVFHFALMVLYSAYTRICAQVVLL

SEQ ID NO: 536 - protein, 83 aa, Human coronavirus
LNLIGWLPVTGLKVVITPLPILQQNHSNFLLLRLYVPLKRRLSSLMLLPPSKKLLVSANYYLCGRLASPNHHSIVIMFLLVII

SEQ ID NO: 537 - protein, 31 aa, Human coronavirus
PKIVKCSSVSTFSSALIIVMLYPTSLVQRIN

SEQ ID NO: 538 - protein, 13 aa, Human coronavirus
VTSSYLPLTLWLP

SEQ ID NO: 539 - protein, 5 aa, Human coronavirus
RRPQL

SEQ ID NO: 540 - protein, 51 aa, Human coronavirus
IKRGMLKLLGCTQPLRYLKSSQVMLPTSKNQVIVNMSLFRDHLALAKVILL

SEQ ID NO: 541 - protein, 29 aa, Human coronavirus
RFTTLQHVLFIQHVHTQLLMLCVKKLLNI

SEQ ID NO: 542 - protein, 73 aa, Human coronavirus
TLLNVPVSFLQRHVLSAMTGLKLMRQILNICLVLLMLYQKLLPIFWWLMRLVCALIMIFQLLMHVLKLSTLSM

SEQ ID NO: 543 - protein, 12 aa, Human coronavirus
EIQHSCQLLGLC

SEQ ID NO: 544 - protein, 15 aa, Human coronavirus
LEAHWNQKISIVSLD

SEQ ID NO: 545 - protein, 5 aa, Human coronavirus
VLTYF

SEQ ID NO: 546 - protein, 9 aa, Human coronavirus
VCATGVLRK

SEQ ID NO: 547 - protein, 9 aa, Human coronavirus
ALLSTIINC

SEQ ID NO: 548 - protein, 17 aa, Human coronavirus
PRRSFQASALKYSIRAM

SEQ ID NO: 549 - protein, 15 aa, Human coronavirus
RMMLALPLIDHNSHL

SEQ ID NO: 550 - protein, 79 aa, Human coronavirus
RILLLPIRHGVRQSLFRLTIHRMLCLVQCWVLPLRLLIPHRVQNTSTLSSVKQQIRHMLTTLTDLMLQSLVPKKVFFVL

SEQ ID NO: 551 - protein, 8 aa, Human coronavirus
HLRHSLSP

SEQ ID NO: 552 - protein, 16 aa, Human coronavirus
SLLNCLLLITSSSLRL

SEQ ID NO: 553 - protein, 36 aa, Human coronavirus
LAFLKIALEKLLASHLLMHQHMLVLMTSIRRVMSFA

SEQ ID NO: 554 - protein, 38 aa, Human coronavirus
ILIYPQMSHTLVLFPGWALNSMQQFLDILSFSLLVKRL

SEQ ID NO: 555 - protein, 6 aa, Human coronavirus
GKFEAG

SEQ ID NO: 556 - protein, 21 aa, Human coronavirus
ASMLRVLMLPVMHVAPMCLYN

SEQ ID NO: 557 - protein, 5 aa, Human coronavirus
DFQLV

SEQ ID NO: 558 - protein, 9 aa, Human coronavirus
TLLFSQLVL

SEQ ID NO: 559 - protein, 7 aa, Human coronavirus
TLSGVTC

SEQ ID NO: 560 - protein, 32 aa, Human coronavirus
RALLHVLHQVNSLSTSCLLCIRGLRGLLLDDV

SEQ ID NO: 561 - protein, 7 aa, Human coronavirus
CKCCQTL

SEQ ID NO: 562 - protein, 17 aa, Human coronavirus
TNCLITVRLFVGLMALN

SEQ ID NO: 563 - protein, 8 aa, Human coronavirus
RLHHTFAR

SEQ ID NO: 564 - protein, 48 aa, Human coronavirus
VRNRSVACAIDALQRTLHLCNLMPAGLIPAVMIMSTTLSLSMFNSGVM

SEQ ID NO: 565 - protein, 24 aa, Human coronavirus
AILLLITIVIALSIKELMWLLMMQ

SEQ ID NO: 566 - protein, 6 aa, Human coronavirus
LFILVL

SEQ ID NO: 567 - protein, 6 aa, Human coronavirus
NVWIGI

SEQ ID NO: 568 - protein, 10 aa, Human coronavirus
SILISHMKRN

SEQ ID NO: 569 - protein, 50 aa, Human coronavirus
IPVVESLSATSYVLLFLPVHLTKSMILAILKEFLLLMTLWLIGIILMHSP

SEQ ID NO: 570 - protein, 72 aa, Human coronavirus
PGRYNSFSIQRTWPQDLLMGSAYFGTVMYQNILIMQLYAGLTHVCILSSICQVVMAVVCMLTSTLFIHQHMM

SEQ ID NO: 571 - protein, 5 aa, Human coronavirus
VHSVI

SEQ ID NO: 572 - protein, 20 aa, Human coronavirus
NLYHSFIILLHHVKCMVMVV

SEQ ID NO: 573 - protein, 7 aa, Human coronavirus
RILIMYP

SEQ ID NO: 574 - protein, 10 aa, Human coronavirus
NLQSVLQLVI

SEQ ID NO: 575 - protein, 71 aa, Human coronavirus
GALFVGSMLQSTESIWKHIILSLHQVSAFGVIRPLIFIISGLLLQKFKVWKTLLLMLLNKAILLVLRVNYL

SEQ ID NO: 576 - protein, 26 aa, Human coronavirus
SMIRSSPRVALMTFVCLRIKPLCLLI

SEQ ID NO: 577 - protein, 59 aa, Human coronavirus
LLNSMLSVLYARIPISNCYTIYKQTFATSSSFGIMNVAIFMVLLLLVYVSTLILMLIQL

SEQ ID NO: 578 - protein, 35 aa, Human coronavirus
IYVLTYAIIVHWRSSCLLPMPSLFLIEKSRNTLVW

SEQ ID NO: 579 - protein, 21 aa, Human coronavirus
VLIMLTSMVLSSVIVMLLNNQ

SEQ ID NO: 580 - protein, 60 aa, Human coronavirus
SSTCIRKSIMSLLILLSVFTLRVALVVTSYPFLTWRKTFYLLIVMFSLRSMAWKTMLLST

SEQ ID NO: 581 - protein, 9 aa, Human coronavirus
SMETSLILR

SEQ ID NO: 582 - protein, 23 aa, Human coronavirus
AVFTCLLVYTRSNRKVILLWKKC

SEQ ID NO: 583 - protein, 25 aa, Human coronavirus
KVAQLFITILLLRLTQRLLRRCVLL

SEQ ID NO: 584 - protein, 6 aa, Human coronavirus
SLTTLL

SEQ ID NO: 585 - protein, 6 aa, Human coronavirus
RVKTLA

SEQ ID NO: 586 - protein, 10 aa, Human coronavirus
YPRLSRFLLT

SEQ ID NO: 587 - protein, 39 aa, Human coronavirus
LSLCYGVRMDRFKPSTLDSRLLQIGNLVMQCHPSLKFKM

SEQ ID NO: 588 - protein, 21 aa, Human coronavirus
TLNVVSLLITSNLFLCLAVCT

SEQ ID NO: 589 - protein, 11 aa, Human coronavirus
TSLNICNCASI

SEQ ID NO: 590 - protein, 4 aa, Human coronavirus
ILAH

SEQ ID NO: 591 - protein, 36 aa, Human coronavirus
PCLPICVLYILALVLIKVSLLVPQFYDSGFLQMPLL

SEQ ID NO: 592 - protein, 8 aa, Human coronavirus
MSSCQMLT

SEQ ID NO: 593 - protein, 6 aa, Human coronavirus
LYLEIV

SEQ ID NO: 594 - protein, 22 aa, Human coronavirus
LYVSANKWILLFPTCMILLLRM

SEQ ID NO: 595 - protein, 31 aa, Human coronavirus
QVVMSQRLYSLLTCVTSLIIILLLVGLLLLK

SEQ ID NO: 596 - protein, 35 aa, Human coronavirus
QNTLGALNFMNLWENLLGGLFSAPMQMHPHLKDSS

SEQ ID NO: 597 - protein, 11 aa, Human coronavirus
VLITWVLLKKI

SEQ ID NO: 598 - protein, 17 aa, Human coronavirus
MVVLCTPTIYFGEIPLL

SEQ ID NO: 599 - protein, 12 aa, Human coronavirus
VLTHFLIYPSFN

SEQ ID NO: 600 - protein, 7 aa, Human coronavirus
KEHQFFN

SEQ ID NO: 601 - protein, 8 aa, Human coronavirus
RRVKLTNS

SEQ ID NO: 602 - protein, 1366 aa, Human coronavirus
YLSCRRVSYLSVTMIHSVFLLMFLLTPTESYVDVGPDSVKSACIEVDIQQTFFDKTWPRPIDVSKADGIIYPQGRTYSNITITYQGLFPYQGDHGDMYVYSAGHATGTTPQKLFVANYSQDVKQFANGFVVRIGAAANSTGTVIISPSTSATIRKIYPAFMLGSSVGNFSDGKMGRFFNHTLVLLPDGCGTLLRAFYCILEPRSGNHCPAGNSYTSFATYHTPATDCSDGNYNRNASLNSFKEYFNLRNCTFMYTYNITEDEILEWFGITQTAQGVHLFSSRYVDLYGGNMFQFATLPVYDTIKYYSIIPHSIRSIQSDRKAWAAFYVYKLQPLTFLLDFSVDGYIRRAIDCGFNDLSQLHCSYESFDVESGVYSVSSFEAKPSGSVVEQAEGVECDFSPLLSGTPPQVYNFKRLVFTNCNYNLTKLLSLFSVNDFTCSQISPAAIASNCYSSLILDYFSYPLSMKSDLSVSSAGPISQFNYKQSFSNPTCLILATVPHNLTTITKPLKYSYINKCSRLLSDDRTEVPQLVNANQYSPCVSIVPSTVWEDGDYYRKQLSPLEGGGWLVASGSTVAMTEQLQMGFGITVQYGTDTNSVCPKLEFANDTKIASQLGNCVEYSLYGVSGRGVFQNCTAVGVRQQRFVYDAYQNLVGYYSDDGNYYCLRACVSVPVSVIYDKETKTHATLFGSVACEHISSTMSQYSRSTRSMLKRRDSTYGPLQTPVGCVLGLVNSSLFVEDCKLPLGQSLCALPDTPSTLTPRSVRSVPGEMRLASIAFNHPIQVDQLNSSYFKLSIPTNFSFGVTQEYIQTTIQKVTVDCKQYVCNGFQKCEQLLREYGQFCSKINQALHGANLRQDDSVRNLFASVKSSQSSPIIPGFGGDFNLTLLEPVSISTGSRSARSAIEDLLFDKVTIADPGYMQGYDDCMQQGPASARDLICAQYVAGYKVLPPLMDVNMEAAYTSSLLGSIAGVGWTAGLSSFAAIPFAQSIFYRLNGVGITQQVLSENQKLIANKFNQALGAMQTGFTTTNEAFQKVQDAVNNNAQALSKLASELSNTFGAISASIGDIIQRLDVLEQDAQIDRLINGRLTTLNAFVAQQLVRSESAALSAQLAKDKVNECVKAQSKRSGFCGQGTHIVSFVVNAPNGLYFMHVGYYPSNHIEVVSAYGLCDAANPTNCIAPVNGYFIKTNNTRIVDEWSYTGSSFYAPEPITSLNTKYVAPQVTYQNISTNLPPPLLGNSTGIDFQDELDEFFKNVSTSIPNFGSLTQINTTLLDLTYEMLSLQQVVKALNESYIDLKELGNYTYYNKWPWYIWLGFIAGLVALALCVFFILCCTGCGTNCMGKLKCNRCCDRYEEYDLEPHKVHVH

SEQ ID NO: 603 - protein, 4 aa, Human coronavirus
LTNY

SEQ ID NO: 604 - protein, 9 aa, Human coronavirus
EFKDHPLSC

SEQ ID NO: 605 - protein, 81 aa, Human coronavirus
CFHSLFWSLHPQNLSMYLSIVRIILVACLGLVLKLPKLIQLVFIQIFELTSHLQNQLVLNQFLSILSQLQLMMVLPNMLLV

SEQ ID NO: 606 - protein, 20 aa, Human coronavirus
IFLTLVTQLINELYGLRVSA

SEQ ID NO: 607 - protein, 7 aa, Human coronavirus
SNLAEVP

SEQ ID NO: 608 - protein, 10 aa, Human coronavirus
LTVYYLFVHP

SEQ ID NO: 609 - protein, 24 aa, Human coronavirus
VYTFSWHFIAPCAVELSAILCWLY

SEQ ID NO: 610 - protein, 19 aa, Human coronavirus
FYKSFGQTGRSSANRLVAT

SEQ ID NO: 611 - protein, 5 aa, Human coronavirus
GWRNP

SEQ ID NO: 612 - protein, 91 aa, Human coronavirus
WMFPLPPALKFIRAKRGRGAILQLRNCATLSVDFLFCAMKTLVLLSNQHTMSGLHFQTPTCGIYVRVIIYTQFTIGLNLMAANLFLSTILL

SEQ ID NO: 613 - protein, 6 aa, Human coronavirus
ISLMKI

SEQ ID NO: 614 - protein, 111 aa, Human coronavirus
LEIFHPLRSFCAMSDLSYMSSPCCAKLLFLMHQRSTVLTYIDLSLCIELTRQSLLLRIGFSFRDFPFTIVASLYICQSLNCMHWMMLLAITSLQCHALELTLNKCLLLLWP

SEQ ID NO: 615 - protein, 42 aa, Human coronavirus
MLSPYGLPIRVINKLFILIPFYIIQDFNELWLSRRLYLNPSS

SEQ ID NO: 616 - protein, 26 aa, Human coronavirus
SQFLLHFIALSLLTLLFSHTFLLAAM

SEQ ID NO: 617 - protein, 37 aa, Human coronavirus
LSMCVSFPYYYCYVKILVVAALSELWFSISLFCITFY

SEQ ID NO: 618 - protein, 11 aa, Human coronavirus
SMVYIIQLEVA

SEQ ID NO: 619 - protein, 4 aa, Human coronavirus
YFSL

SEQ ID NO: 620 - protein, 8 aa, Human coronavirus
IEFVSVSC

SEQ ID NO: 621 - protein, 26 aa, Human coronavirus
IPTFHCLTCVPTLFVLVQFLLMVWSL

SEQ ID NO: 622 - protein, 28 aa, Human coronavirus
YTPNHYLLETSISVAAVLVVFICTLPLI

SEQ ID NO: 623 - protein, 12 aa, Human coronavirus
SALILAVLVRLA

SEQ ID NO: 624 - protein, 4 aa, Human coronavirus
LTSP

SEQ ID NO: 625 - protein, 19 aa, Human coronavirus
TAMFPLFSCLQRAIQFLFT

SEQ ID NO: 626 - protein, 18 aa, Human coronavirus
SPRARLSFKQLCATMGPV

SEQ ID NO: 627 - protein, 4 aa, Human coronavirus
RLIH

SEQ ID NO: 628 - protein, 18 aa, Human coronavirus
SLFGHMENELCYPLSKNE

SEQ ID NO: 629 - protein, 6 aa, Human coronavirus
TFSFLP

SEQ ID NO: 630 - protein, 18 aa, Human coronavirus
HSWCVWLSLRLLDYVCNV

SEQ ID NO: 631 - protein, 6 aa, Human coronavirus
QASIPC

SEQ ID NO: 632 - protein, 15 aa, Human coronavirus
FSPHYTCIILDVQSM

SEQ ID NO: 633 - protein, 22 aa, Human coronavirus
NSRIVNPLYHLTSGFNELLHNV

SEQ ID NO: 634 - protein, 5 aa, Human coronavirus
YDATH

SEQ ID NO: 635 - protein, 7 aa, Human coronavirus
GADYCHY

SEQ ID NO: 636 - protein, 24 aa, Human coronavirus
RLELCMVPDLSLNYYRTTVWIPIP

SEQ ID NO: 637 - protein, 6 aa, Human coronavirus
YDCLCL

SEQ ID NO: 638 - protein, 17 aa, Human coronavirus
NVCFMAPMAIFHGAINI

SEQ ID NO: 639 - protein, 5 aa, Human coronavirus
RRLSN

SEQ ID NO: 640 - protein, 40 aa, Human coronavirus
SSFPDNLWHCSSCFSYDVDFLLCAEYPAVYENWIMVVIQS

SEQ ID NO: 641 - protein, 42 aa, Human coronavirus
LPFERSIWWYNCRTSTRRGLYQCNCCCNQWPPQNGWHAFRCL

SEQ ID NO: 642 - protein, 5 aa, Human coronavirus
LRQTS

SEQ ID NO: 643 - protein, 22 aa, Human coronavirus
SHRGQTQCADCFKNGEAAKLRN

SEQ ID NO: 644 - protein, 7 aa, Human coronavirus
FRRCHLP

SEQ ID NO: 645 - protein, 10 aa, Human coronavirus
LQESAYYGGY

SEQ ID NO: 646 - protein, 14 aa, Human coronavirus
TCIASSLGSLVRVS

SEQ ID NO: 647 - protein, 423 aa, Human coronavirus
LILTNLNFIVMASPAAPRAVSFADNNDITNTNLSRGRGRNPKPRAAPNNTVSWYTGLTQHGKVPLTFPPGQGVPLNANSTPAQNAGYWRRQDRKINTGNGIKQLAPRWYFYYTGTGPEAALPFRAVKDGIVWVHEDGATDAPSTFGTRNPNNDSAIVTQFAPGTKLPKNFHIEGTGGNSQSSSRASSLSRNSSRSSSQGSRSGNSTRGTSPGPSGIGAVGGDLLYLDLLNRLQALESGKVKQSQPKVITKKDAAAAKNKMRHKRTSTKSFNMVQAFGLRGPGDLQGNFGDLQLNKLGTEDPRWPQIAELAPTASAFMGMSQFKLTHQNNDDHGNPVYFLRYSGAIKLDPKNPNYNKWLELLEQNIDAYKTFPKKEKKQKAPKEESTDQMSEPPKEQRVQGSITQRTRTRPSVQPGPMIDVNTD

SEQ ID NO: 648 - protein, 4 aa, Human coronavirus
CHSK

SEQ ID NO: 649 - protein, 27 aa, Human coronavirus
QDRGNRLCLATPSHHRLSTLAQNGIML

SEQ ID NO: 650 - protein, 33 aa, Human coronavirus
LQCNKVIITHLIDSYALLKCVAVERMLKTVTSA

SEQ ID NO: 651 - protein, 17 aa, Human coronavirus
LQVNSAPREELYSVKCK

SEQ ID NO: 652 - protein, 8 aa, Human coronavirus
KIAIIQLD

SEQ ID NO: 653 - protein, 9 aa, Human coronavirus
MICKKKKKK

SEQ ID NO: 654 - DNA, 30124 bp, Human coronavirus; identical to SEQ ID NO: 14
  CDS (3)..(30122)

SEQ ID NO: 655 - protein, 13 aa, Human coronavirus
LGYLTSPRSLAEL

SEQ ID NO: 656 - protein, 24 aa, Human coronavirus
IKALLFSVSLHLSGGIVALICLLI

SEQ ID NO: 657 - protein, 50 aa, Human coronavirus
AVDICSTLGIILIEYYFSVRASCLLYVSVTIHGFVRCVAIRGTSCLSWLV

SEQ ID NO: 658 - protein, 23 aa, Human coronavirus
PRKVRAVRIEQRSTLKNIKTMCL

SEQ ID NO: 659 - protein, 27 aa, Human coronavirus
LCHSVVQETWLKNFHHGSWMAKMPMKW

SEQ ID NO: 660 - protein, 130 aa, Human coronavirus
RPCYLKRSHFSMCPSGWLDTLDTSQVLVCTWLRGSLLVKIHSWLTNWLIALVQMAAWLAQLCRASLLVCSSLMTSNLSQESKIFSCASMAVVVITTPHSTMSETTPLALSGWTILRRILKANMPRICLRS

SEQ ID NO: 661 - protein, 25 aa, Human coronavirus
LAVMSLQLTNTCVALMENPLVPTHF

SEQ ID NO: 662 - protein, 5 aa, Human coronavirus
WPRME

SEQ ID NO: 663 - protein, 21 aa, Human coronavirus
PNWLMLKRTSQHVLMTKASSH

SEQ ID NO: 664 - protein, 49 aa, Human coronavirus
RTIYIDWFGMLSVKTFHILSNLFLLLIVWSKRMVLKTLLLTILLLDAKF

SEQ ID NO: 665 - protein, 80 aa, Human coronavirus
RSPHATSGVAFLTCPSNKNSFTPSMVRSHLRTQPTFTTPHSLSVEVVVMIPGLQGMLSKGLPVDVGHHIQLMMSKSNHLA

SEQ ID NO: 666 - protein, 53 aa, Human coronavirus
LSQMLFFVLLAPLLRVIAVLLIANIQLLSWLVTFLNAVMLLLILSPSHLSLVA

SEQ ID NO: 667 - protein, 96 aa, Human coronavirus
LTPTLDVRKVLCTLCLELSLLSQGLETPSLQAVLALGTRSLKLLTCSWNRLSIPLTLWESSLSTMLSSQFSLEPQLMLTKYASFSKVSPLTSCVII

SEQ ID NO: 668 - protein, 4 aa, Human coronavirus
LTMT

SEQ ID NO: 669 - protein, 28 aa, Human coronavirus
QSLPAHSWIMLLMLVVQDYSMPPLLHLM

SEQ ID NO: 670 - protein, 4 aa, Human coronavirus
FSLA

SEQ ID NO: 671 - protein, 56 aa, Human coronavirus
VSPLRKLQPYRIRFATLLRILWLIMLTACCTEFFLMTWILVCHPLVNYFLIALIFQ

SEQ ID NO: 672 - protein, 5 aa, Human coronavirus
LLPIF

SEQ ID NO: 673 - protein, 26 aa, Human coronavirus
SASCKIRLATLCLQLLLPAKLLLVSF

SEQ ID NO: 674 - protein, 14 aa, Human coronavirus
IHVLKLQKQHLTSC

SEQ ID NO: 675 - protein, 35 aa, Human coronavirus
IWQDCSESFSAMPMCTLHKGLWWSMAKFLHLSNKC

SEQ ID NO: 676 - protein, 31 aa, Human coronavirus
TCLIRVCNFCIQRSPGLVLKSLLLSTAAGSL

SEQ ID NO: 677 - protein, 33 aa, Human coronavirus
YSHREPITVSPLRLSPFNKILTLFCLVSFPRSS

SEQ ID NO: 678 - protein, 38 aa, Human coronavirus
DCSNLLTILQLLVLLYPVTWLKLLWVNLSKLICIVLML

SEQ ID NO: 679 - protein, 46 aa, Human coronavirus
VTMSLLVKNCLCVVRKKTDLPSTLLALMVMLYRLSLDLREVHLVKK

SEQ ID NO: 680 - protein, 12 aa, Human coronavirus
PLAVIKYMRLLL

SEQ ID NO: 681 - protein, 12 aa, Human coronavirus
EVLLSSTTFMLY

SEQ ID NO: 682 - protein, 13 aa, Human coronavirus
THYLLLLVLEPLL

SEQ ID NO: 683 - protein, 11 aa, Human coronavirus
ISLCQLRSLLT

SEQ ID NO: 684 - protein, 21 aa, Human coronavirus
RNKSQTCLLNYCVECRFQILI

SEQ ID NO: 685 - protein, 22 aa, Human coronavirus
TILLTHHAIALTLRVMHPGLLL

SEQ ID NO: 686 - protein, 15 aa, Human coronavirus
SSLFTPSSVTRSVLK

SEQ ID NO: 687 - protein, 4 aa, Human coronavirus
RLQI

SEQ ID NO: 688 - protein, 53 aa, Human coronavirus
KKVNQSAFLRLQLNKLTFLMRLLTTSGLLQLMKRSLSMKQKMLLNLCKKKHNQ

SEQ ID NO: 689 - protein, 11 aa, Human coronavirus
KYLLKILRRLS

SEQ ID NO: 690 - protein, 20 aa, Human coronavirus
LTPYRKLLLCLILLKSHRKW

SEQ ID NO: 691 - protein, 12 aa, Human coronavirus
NFRLHLRLSSPR

SEQ ID NO: 692 - protein, 46 aa, Human coronavirus
KKLHLSMRLIPNRHRMLLLNLRGYAKSVMLTLCPILNIRLLQSALP

SEQ ID NO: 693 - protein, 5 aa, Human coronavirus
VTQFK

SEQ ID NO: 694 - protein, 8 aa, Human coronavirus
PSAMGSLC

SEQ ID NO: 695 - protein, 41 aa, Human coronavirus
LMLLTHILSMAVVSLVLLMRLQKGLSKKSQMSIFWLKGRYK

SEQ ID NO: 696 - protein, 10 aa, Human coronavirus
EIQFSCKAIL

SEQ ID NO: 697 - protein, 7 aa, Human coronavirus
LRISCMS

SEQ ID NO: 698 - protein, 19 aa, Human coronavirus
AQMPALNRMFLSLVSAIRL

SEQ ID NO: 699 - protein, 5 aa, Human coronavirus
MHILL

SEQ ID NO: 700 - protein, 11 aa, Human coronavirus
SLLLFQQAYLV

SEQ ID NO: 701 - protein, 17 aa, Human coronavirus
NQLCLLIILLGRLRLEF

SEQ ID NO: 702 - protein, 13 aa, Human coronavirus
SSLIPKMSIRVLP

SEQ ID NO: 703 - protein, 6 aa, Human coronavirus
LTFHRV

SEQ ID NO: 704 - protein, 61 aa, Human coronavirus
LFHMMGYVAQYVKLKIMVLLFLCAQTTLLTLKFLGTRVLIILRSFLQLTVCNIIATRLRTL

SEQ ID NO: 705 - protein, 24 aa, Human coronavirus
MISYNRLISLLVLYLCLWDMCLMV

SEQ ID NO: 706 - protein, 17 aa, Human coronavirus
CKQGVSCVELTCPTCVS

SEQ ID NO: 707 - protein, 8 aa, Human coronavirus
LIKSKKLF

SEQ ID NO: 708 - protein, 6 aa, Human coronavirus
CLKTLS

SEQ ID NO: 709 - protein, 6 aa, Human coronavirus
TLQKIL

SEQ ID NO: 710 - protein, 13 aa, Human coronavirus
STSALMVVTILGI

SEQ ID NO: 711 - protein, 11 aa, Human coronavirus
SRVNYWCKTYA

SEQ ID NO: 712 - protein, 20 aa, Human coronavirus
ISSCIGLIKPYATRIVCFML

SEQ ID NO: 713 - protein, 25 aa, Human coronavirus
RIVQLFHLKHFQHVVRIWIHARHSS

SEQ ID NO: 714 - protein, 4 aa, Human coronavirus
QSKS

SEQ ID NO: 715 - protein, 4 aa, Human coronavirus
LSMV

SEQ ID NO: 716 - protein, 6 aa, Human coronavirus
ILEQSF

SEQ ID NO: 717 - protein, 35 aa, Human coronavirus
IIRTLIDHSLDAFSLMVLIFLTPFLMRNRMVTVYI

SEQ ID NO: 718 - protein, 45 aa, Human coronavirus
LLMKQRRLKSYMAPLILLSYTDSIHLRLQSMGGRWLCVIRYVLSN

SEQ ID NO: 719 - protein, 11 aa, Human coronavirus
VIIIVILMQLL

SEQ ID NO: 720 - protein, 4 aa, Human coronavirus
HLIY

SEQ ID NO: 721 - protein, 14 aa, Human coronavirus
RTLNLLYLLYSMHL

SEQ ID NO: 722 - protein, 10 aa, Human coronavirus
NIRAVIQLTS

SEQ ID NO: 723 - protein, 46 aa, Human coronavirus
PSLWLMAIAHLVLQMMPLGYFIPCLQRLSYAVLHAWFGESGAMSVA

SEQ ID NO: 724 - protein, 7 aa, Human coronavirus
KMLFYKA

SEQ ID NO: 725 - protein, 17 aa, Human coronavirus
KLVVTWVCKLLKICVLA

SEQ ID NO: 726 - protein, 13 aa, Human coronavirus
HMYASVVVNVIGN

SEQ ID NO: 727 - protein, 18 aa, Human coronavirus
SNTPPPGCCSQAHQMKNW

SEQ ID NO: 728 - protein, 8 aa, Human coronavirus
QPPRRLIL

SEQ ID NO: 729 - protein, 19 aa, Human coronavirus
HLMSFRALKRLLAIMFMLA

SEQ ID NO: 730 - protein, 5 aa, Human coronavirus
RVVLF

SEQ ID NO: 731 - protein, 16 aa, Human coronavirus
SLTLAPLARLQTGSAR

SEQ ID NO: 732 - protein, 49 aa, Human coronavirus
QMYFSPAKNTVAIVMSYGILWTVISEQRLIPTYLLSMLRMVNTLQVNHP

SEQ ID NO: 733 - protein, 7 aa, Human coronavirus
HIHQLQF

SEQ ID NO: 734 - protein, 23 aa, Human coronavirus
LVVSTLIAALYRLMDNLAVMLLV

SEQ ID NO: 735 - protein, 5 aa, Human coronavirus
VLITF

SEQ ID NO: 736 - protein, 72 aa, Human coronavirus
GLILVNQSLRNTLTPSCLKKTAMCCWLSLTLMTLFIRMVPCIKANQFFGSIKHLMILILISSIELVCVKFLT

SEQ ID NO: 737 - protein, 11 aa, Human coronavirus
PPLNSKINSHL

SEQ ID NO: 738 - protein, 11 aa, Human coronavirus
VWSLHQLNLQL

SEQ ID NO: 739 - protein, 5 aa, Human coronavirus
HFNRK

SEQ ID NO: 740 - protein, 7 aa, Human coronavirus
QLSNVRV

SEQ ID NO: 741 - protein, 4 aa, Human coronavirus
INLS

SEQ ID NO: 742 - protein, 28 aa, Human coronavirus
RTMSVSLLMIQVLPLLSICLKKTYIHCM

SEQ ID NO: 743 - protein, 8 aa, Human coronavirus
TLSIKSLS

SEQ ID NO: 744 - protein, 27 aa, Human coronavirus
KTMYFLLCLDCTPLSQVILTLLQLPDL

SEQ ID NO: 745 - protein, 23 aa, Human coronavirus
SYYLGLHFISKNLLPALSLLPLL

SEQ ID NO: 746 - protein, 6 aa, Human coronavirus
VLLKAY

SEQ ID NO: 747 - protein, 14 aa, Human coronavirus
QAVLVLPRCYLCFH

SEQ ID NO: 748 - protein, 14 aa, Human coronavirus
LTLVIQNSAPQRLK

SEQ ID NO: 749 - protein, 5 aa, Human coronavirus
KQPAL

SEQ ID NO: 750 - protein, 4 aa, Human coronavirus
QVML

SEQ ID NO: 751 - protein, 9 aa, Human coronavirus
NSVALLLLI

SEQ ID NO: 752 - protein, 51 aa, Human coronavirus
VWISCAVWIGNQPYGCYLCYAQLWYCCLLCITCMSSIRSYQVMLCLKMPKV

SEQ ID NO: 753 - protein, 10 aa, Human coronavirus
KSSTKKLELT

SEQ ID NO: 754 - protein, 34 aa, Human coronavirus
ESLLLVTVLLQLIGRIPLMYLHSAQTVLQCVIGA

SEQ ID NO: 755 - protein, 5 aa, Human coronavirus
LAKIP

SEQ ID NO: 756 - protein, 19 aa, Human coronavirus
LTTQLLRWFKHILATMFLT

SEQ ID NO: 757 - protein, 39 aa, Human coronavirus
IGCGLHLRLVWHTCSIPRPSTGCCWQVHCIISLHRLPYL

SEQ ID NO: 758 - protein, 30 aa, Human coronavirus
TGGHTIMLCLVPSGYSPTFQWRVWYECIIC

SEQ ID NO: 759 - protein, 12 aa, Human coronavirus
HAFGFYASFISM

SEQ ID NO: 760 - protein, 123 aa, Human coronavirus
SMVAKIRHACSAIRGTDLLELKLLPLSVVENVRFISQQMAVFHSVVGIIGIVWIVTLQVWGIPSSVKKSQMTSLPPYAGLLTLRIDHIIMWIPLQLKRLLFSLIIVETVNHSTSGFPSALLQI

SEQ ID NO: 761 - protein, 29 aa, Human coronavirus
SSKRSVKLLLVYLNTTLSSTTHQIVARKV

SEQ ID NO: 762 - protein, 66 aa, Human coronavirus
LGLHVFIILKSCVNQFFWLTQVWLLLLVILVKSPLKCLIPLLIVSSRCIMSHAISWKNLSLLLVMA

SEQ ID NO: 763 - protein, 9 aa, Human coronavirus
GEAITSIVS

SEQ ID NO: 764 - protein, 58 aa, Human coronavirus
QHSLTQHEAPQVWSLMLRPMKLLTLCSMLINMTYKLLMRATIIMYPHMLNLIVCLPAI

SEQ ID NO: 765 - protein, 30 aa, Human coronavirus
VVSLIVMRLQLTKLSCVILMVLAFGTLLHI

SEQ ID NO: 766 - protein, 18 aa, Human coronavirus
NSRMHLNDRFALHAVSVI

SEQ ID NO: 767 - protein, 36 aa, Human coronavirus
PPQSYALMIISYQLDSLLTKLLVVLLHGLMRCVTLR

SEQ ID NO: 768 - protein, 15 aa, Human coronavirus
RVMFLLPLLCFCVLY

SEQ ID NO: 769 - protein, 33 aa, Human coronavirus
CICVYLHFLWHLLNFMKTASWTLKFLIMVSLGM

SEQ ID NO: 770 - protein, 33 aa, Human coronavirus
ILMISALLISTGPSHNGIMSMLVVSMTTLSHAH

SEQ ID NO: 771 - protein, 18 aa, Human coronavirus
LLELLVLAFQTYLLHWLG

SEQ ID NO: 772 - protein, 18 aa, Human coronavirus
FSLFLESLLIQAVFATLL

SEQ ID NO: 773 - protein, 28 aa, Human coronavirus
MRYPIRVSLIVVAFFHLSALCLGMQRAV

SEQ ID NO: 774 - protein, 18 aa, Human coronavirus
HHTAMILLFCLGLLRTVR

SEQ ID NO: 775 - protein, 19 aa, Human coronavirus
GLMFVTTCMMVTCLLNFLK

SEQ ID NO: 776 - protein, 62 aa, Human coronavirus
YLKVHLGLLELCQLSTAGSVVVSMHKRVFVLPQMARGPFLMTTILIDLVSIVALILLTLSGG

SEQ ID NO: 777 - protein, 12 aa, Human coronavirus
QYHCSSLLLISN

SEQ ID NO: 778 - protein, 7 aa, Human coronavirus
LPHWSWV

SEQ ID NO: 779 - protein, 5 aa, Human coronavirus
VCVRS

SEQ ID NO: 780 - protein, 9 aa, Human coronavirus
LCSSIILIK

SEQ ID NO: 781 - protein, 11 aa, Human coronavirus
NVLLQITPSVL

SEQ ID NO: 782 - protein, 22 aa, Human coronavirus
LLLLLLFLIACASALLPLYHCV

SEQ ID NO: 783 - protein, 37 aa, Human coronavirus
YLTLHCTIMLHSILLMSLHLLCMFLGTLCSGLSFPYG

SEQ ID NO: 784 - protein, 16 aa, Human coronavirus
PASIQLQCALDTSSGF

SEQ ID NO: 785 - protein, 7 aa, Human coronavirus
LILVRNM

SEQ ID NO: 786 - protein, 33 aa, Human coronavirus
KFLLMVSLIVVSRTLPLISLLLTRTLMQLLETL

SEQ ID NO: 787 - protein, 57 aa, Human coronavirus
LMMPIHDFWGCLTSISTSLVLWKQPLIVKLQHVILLKPYKHTARLVVIFFTNHPTVA

SEQ ID NO: 788 - protein, 9 aa, Human coronavirus
PLACCKAVW

SEQ ID NO: 789 - protein, 20 aa, Human coronavirus
KCHIPVEMLRLVWFRLPAVA

SEQ ID NO: 790 - protein, 16 aa, Human coronavirus
LLMVFGLTTQSGAHDT

SEQ ID NO: 791 - protein, 15 aa, Human coronavirus
CARLTSCLILIMMPC

SEQ ID NO: 792 - protein, 28 aa, Human coronavirus
LIIVSVCKNTLALQQTCVLLVMPCKALF

SEQ ID NO: 793 - protein, 16 aa, Human coronavirus
LSMLLTLALQPTLLQQ

SEQ ID NO: 794 - protein, 8 aa, Human coronavirus
NLAQHLVC

SEQ ID NO: 795 - protein, 13 aa, Human coronavirus
HAIMVVRLVHSLL

SEQ ID NO: 796 - protein, 26 aa, Human coronavirus
CALTTQLRVPFCVVLVVVLVTPRRVV

SEQ ID NO: 797 - protein, 38 aa, Human coronavirus
SISVTCIKWNLLMVHIPVQHLMVLCMVPLWINKCTKFS

SEQ ID NO: 798 - protein, 8 aa, Human coronavirus
QTNTAVLM

SEQ ID NO: 799 - protein, 14 aa, Human coronavirus
LGFTQQYLMVALGL

SEQ ID NO: 800 - protein, 30 aa, Human coronavirus
NLIALVLFLLMNGLLPTNSLNLLALNPLTC

SEQ ID NO: 801 - protein, 54 aa, Human coronavirus
LSKQALLLNSCFMRSNNCILGSRESKSLAVPCWKMNSHLRMLICRLWVWLCRVV

SEQ ID NO: 802 - protein, 19 aa, Human coronavirus
EKLHMVLRIGCLRPLSQPM

SEQ ID NO: 803 - protein, 26 aa, Human coronavirus
SYKPLNLLCGTTCLRLFPHSCSHSYL

SEQ ID NO: 804 - protein, 15 aa, Human coronavirus
LWPSLCCWLNTNTPF

SEQ ID NO: 805 - protein, 10 aa, Human coronavirus
HFSCCLWLFV

SEQ ID NO: 806 - protein, 4 aa, Human coronavirus
LMQT

SEQ ID NO: 807 - protein, 11 aa, Human coronavirus
STSPLLPFRQR

SEQ ID NO: 808 - protein, 30 aa, Human coronavirus
LQLQIGLPPLMLICALHILILVSTLVCHLY

SEQ ID NO: 809 - protein, 12 aa, Human coronavirus
RDCTTHHFLTLR

SEQ ID NO: 810 - protein, 5 aa, Human coronavirus
HCAVV

SEQ ID NO: 811 - protein, 59 aa, Human coronavirus
CGCTLIALEKPQAPLPIWFLSLHSLVIIRLQSLLLSTLQKFALMPSLLTHHSLHLCFRK

SEQ ID NO: 812 - protein, 7 aa, Human coronavirus
YFYYTHV

SEQ ID NO: 813 - protein, 13 aa, Human coronavirus
VSCVLAILVSSLF

SEQ ID NO: 814 - protein, 22 aa, Human coronavirus
TLSLEHLWVSMTLRSQHKSSDS

SEQ ID NO: 815 - protein, 4 aa, Human coronavirus
LLTI

SEQ ID NO: 816 - protein, 11 aa, Human coronavirus
LHLEILGRLWL

SEQ ID NO: 817 - protein, 7 aa, Human coronavirus
VLAVHLV

SEQ ID NO: 818 - protein, 27 aa, Human coronavirus
RLLLCSLNLQILNAHLWFSSLCSNSYT

SEQ ID NO: 819 - protein, 30 aa, Human coronavirus
RLIVGPGLSVLNAIMIYWQQQTPVRLSRNS

SEQ ID NO: 820 - protein, 5 aa, Human coronavirus
VSLLL

SEQ ID NO: 821 - protein, 5 aa, Human coronavirus
LFLVM

SEQ ID NO: 822 - protein, 4 aa, Human coronavirus
ILMR

SEQ ID NO: 823 - protein, 20 aa, Human coronavirus
LVIFLTLLAYFKLLFLSFHT

SEQ ID NO: 824 - protein, 35 aa, Human coronavirus
LPLLSWKLRRKPIRKLWTLVTPHHKFLRLCRRLLI

SEQ ID NO: 825 - protein, 14 aa, Human coronavirus
LKTPMRRIRQWPVS

SEQ ID NO: 826 - protein, 7 aa, Human coronavirus
NVWLIRL

SEQ ID NO: 827 - protein, 26 aa, Human coronavirus
LLCISKHVLKTRKQKLSVLCKLCCLV

SEQ ID NO: 828 - protein, 36 aa, Human coronavirus
LRSSTTMFLMVSFLTLGMVVYLLVSSHCVLQINFAL

SEQ ID NO: 829 - protein, 9 aa, Human coronavirus
FLTSPSGIR

SEQ ID NO: 830 - protein, 17 aa, Human coronavirus
SHIPRLTTLGLCGTLQL

SEQ ID NO: 831 - protein, 13 aa, Human coronavirus
TMWTMKLLSLQML

SEQ ID NO: 832 - protein, 5 aa, Human coronavirus
TAMKI

SEQ ID NO: 833 - protein, 5 aa, Human coronavirus
HGHLF

SEQ ID NO: 834 - protein, 21 aa, Human coronavirus
NALGHPLLPLSCKIMRSNLQV

SEQ ID NO: 835 - protein, 18 aa, Human coronavirus
KPWLCLRVKSKLTVILVP

SEQ ID NO: 836 - protein, 11 aa, Human coronavirus
LITNLCRVVKC

SEQ ID NO: 837 - protein, 23 aa, Human coronavirus
WLFFLIMPISNGRVLKVRTDLSV

SEQ ID NO: 838 - protein, 8 aa, Human coronavirus
SYNLLANS

SEQ ID NO: 839 - protein, 26 aa, Human coronavirus
LRDQKDLKSDISILLKILTTFIAGKC

SEQ ID NO: 840 - protein, 47 aa, Human coronavirus
GTLLRLLDCKLVLTPSLPLIPRCCHLLTSPLILKKLISISSMREVPH

SEQ ID NO: 841 - protein, 14 aa, Human coronavirus
QIVLRCLLLKLVQV

SEQ ID NO: 842 - protein, 27 aa, Human coronavirus
LYLLNQRVQLIKRLMVELQCVSIAVRI

SEQ ID NO: 843 - protein, 65 aa, Human coronavirus
NILMSLVFVNIRVSLSKSLLSVSVTLWDFVCQIPPVMSVNIGLDMGAIVTRLGKQHCPNLKIPIF

SEQ ID NO: 844 - protein, 20 aa, Human coronavirus
TSPGFYCKCPNRTLFKWFVH

SEQ ID NO: 845 - protein, 4 aa, Human coronavirus
HLQL

SEQ ID NO: 846 - protein, 10 aa, Human coronavirus
GCWYWKILQD

SEQ ID NO: 847 - protein, 5 aa, Human coronavirus
VCRIR

SEQ ID NO: 848 - protein, 11 aa, Human coronavirus
PRASFRLLFCR

SEQ ID NO: 849 - protein, 7 aa, Human coronavirus
EAYYGEL

SEQ ID NO: 850 - protein, 10 aa, Human coronavirus
TREALLRLVT

SEQ ID NO: 851 - protein, 5 aa, Human coronavirus
CCSSP

SEQ ID NO: 852 - protein, 4 aa, Human coronavirus
FLHL

SEQ ID NO: 853 - protein, 4 aa, Human coronavirus
CRQS

SEQ ID NO: 854 - protein, 10 aa, Human coronavirus
NTSYCTSAFN

SEQ ID NO: 855 - protein, 13 aa, Human coronavirus
VHYDGSCICPEAL

SEQ ID NO: 856 - protein, 9 aa, Human coronavirus
GYLSEVWLL

SEQ ID NO: 857 - protein, 4 aa, Human coronavirus
CYLL

SEQ ID NO: 858 - protein, 9 aa, Human coronavirus
KSQCYWCLS

SEQ ID NO: 859 - protein, 13 aa, Human coronavirus
TWRTCTPSYLKHC

SEQ ID NO: 860 - protein, 18 aa, Human coronavirus
PHGQGWFSRCAHTRQPGP

SEQ ID NO: 861 - protein, 4 aa, Human coronavirus
WQVV

SEQ ID NO: 862 - protein, 13 aa, Human coronavirus
LRNHSTWFRSSYS

SEQ ID NO: 863 - protein, 17 aa, Human coronavirus
LLFLFDACALNDRLSGR

SEQ ID NO: 864 - protein, 4 aa, Human coronavirus
VATY

SEQ ID NO: 865 - protein, 4 aa, Human coronavirus
GTTL

SEQ ID NO: 866 - protein, 11 aa, Human coronavirus
ILGSDVSRKLR

SEQ ID NO: 867 - protein, 7 aa, Human coronavirus
PLCVTLC

SEQ ID NO: 868 - protein, 10 aa, Human coronavirus
FQCIVCYDHA

SEQ ID NO: 869 - protein, 12 aa, Human coronavirus
DLFRTHSPKDLC

SEQ ID NO: 870 - protein, 23 aa, Human coronavirus
WRAICSILWLSLQRIRFSHEYGC

SEQ ID NO: 871 - protein, 7 aa, Human coronavirus
GVDDVCR

SEQ ID NO: 872 - protein, 8 aa, Human coronavirus
SSHAHCLL

SEQ ID NO: 873 - protein, 6 aa, Human coronavirus
FEDIMF

SEQ ID NO: 874 - protein, 18 aa, Human coronavirus
CRCTYNWFDFSNCAAWQF

SEQ ID NO: 875 - protein, 4 aa, Human coronavirus
PRLL

SEQ ID NO: 876 - protein, 4 aa, Human coronavirus
FRGI

SEQ ID NO: 877 - protein, 16 aa, Human coronavirus
GGLFSDAQTFFLCSRW

SEQ ID NO: 878 - protein, 6 aa, Human coronavirus
CCYYRL

SEQ ID NO: 879 - protein, 4 aa, Human coronavirus
LLFL

SEQ ID NO: 880 - protein, 5 aa, Human coronavirus
SAYYV

SEQ ID NO: 881 - protein, 18 aa, Human coronavirus
HQTNVVLHGSCKQVLRNL

SEQ ID NO: 882 - protein, 4 aa, Human coronavirus
RWLS

SEQ ID NO: 883 - protein, 9 aa, Human coronavirus
FRQECWPSF

SEQ ID NO: 884 - protein, 8 aa, Human coronavirus
VWQSSCLL

SEQ ID NO: 885 - protein, 8 aa, Human coronavirus
EHVLPGAR

SEQ ID NO: 886 - protein, 7 aa, Human coronavirus
TFCHDKA

SEQ ID NO: 887 - protein, 14 aa, Human coronavirus
RHSYHDSNESKICY

SEQ ID NO: 888 - protein, 10 aa, Human coronavirus
SSHCCRRVHT

SEQ ID NO: 889 - protein, 8 aa, Human coronavirus
SPVPSENA

SEQ ID NO: 890 - protein, 25 aa, Human coronavirus
VHGCNSWSDLRHWYYKVLRWLGFHA

SEQ ID NO: 891 - protein, 6 aa, Human coronavirus
NIVQRC

SEQ ID NO: 892 - protein, 9 aa, Human coronavirus
SASYGLGLP

SEQ ID NO: 893 - protein, 9 aa, Human coronavirus
NLRFTHISS

SEQ ID NO: 894 - protein, 16 aa, Human coronavirus
TWHLLYYKGQILSLGK

SEQ ID NO: 895 - protein, 23 aa, Human coronavirus
VCSGAKRICSMWWWLLRQTWRYQ

SEQ ID NO: 896 - protein, 9 aa, Human coronavirus
RRCHHCICQ

SEQ ID NO: 897 - protein, 7 aa, Human coronavirus
HFAGDNC

SEQ ID NO: 898 - protein, 7 aa, Human coronavirus
CQCTYGC

SEQ ID NO: 899 - protein, 5 aa, Human coronavirus
WQQDC

SEQ ID NO: 900 - protein, 4 aa, Human coronavirus
RHAV

SEQ ID NO: 901 - protein, 9 aa, Human coronavirus
FVCQCLQEH

SEQ ID NO: 902 - protein, 6 aa, Human coronavirus
PRPQIC

SEQ ID NO: 903 - protein, 5 aa, Human coronavirus
ILCFS

SEQ ID NO: 904 - protein, 8 aa, Human coronavirus
ALFYDDTV

SEQ ID NO: 905 - protein, 5 aa, Human coronavirus
RCRLL

SEQ ID NO: 906 - protein, 9 aa, Human coronavirus
GLHCWNTEF

SEQ ID NO: 907 - protein, 12 aa, Human coronavirus
GNAVLSEQCLYV

SEQ ID NO: 908 - protein, 12 aa, Human coronavirus
MLGGNRSEERAT

SEQ ID NO: 909 - protein, 9 aa, Human coronavirus
ILFTAYALY

SEQ ID NO: 910 - protein, 24 aa, Human coronavirus
GWRRWLLPSLSRPFKNFVCRLLCR

SEQ ID NO: 911 - protein, 21 aa, Human coronavirus
RYTHGRAVCVFGYRCLPSHKA

SEQ ID NO: 912 - protein, 19 aa, Human coronavirus
RYRIPECILGLLTVYRKTV

SEQ ID NO: 913 - protein, 7 aa, Human coronavirus
RPYRTHA

SEQ ID NO: 914 - protein, 8 aa, Human coronavirus
QLFCHAMW

SEQ ID NO: 915 - protein, 7 aa, Human coronavirus
VLGRGIL

SEQ ID NO: 916 - protein, 27 aa, Human coronavirus
FAYHFAGCRFMRCMPFTDFPTLWDMHP

SEQ ID NO: 917 - protein, 5 aa, Human coronavirus
TISLL

SEQ ID NO: 918 - protein, 7 aa, Human coronavirus
SCYSNST

SEQ ID NO: 919 - protein, 10 aa, Human coronavirus
DGFVCFSLRL

SEQ ID NO: 920 - protein, 10 aa, Human coronavirus
CPWLWRFRRY

SEQ ID NO: 921 - protein, 13 aa, Human coronavirus
AIFRWYELLLCRS

SEQ ID NO: 922 - protein, 5 aa, Human coronavirus
FSTLR

SEQ ID NO: 923 - protein, 13 aa, Human coronavirus
WSCIRLIQEYVHR

SEQ ID NO: 924 - protein, 4 aa, Human coronavirus
SFYS

SEQ ID NO: 925 - protein, 4 aa, Human coronavirus
VGYL

SEQ ID NO: 926 - protein, 16 aa, Human coronavirus
LHPCQYYNRTTQTFCC

SEQ ID NO: 927 - protein, 5 aa, Human coronavirus
DFTCH

SEQ ID NO: 928 - protein, 13 aa, Human coronavirus
AVLCYCHHQRNCW

SEQ ID NO: 929 - protein, 18 aa, Human coronavirus
APTITCVGGWQVQTTTQS

SEQ ID NO: 930 - protein, 11 aa, Human coronavirus
LCFYWLSYNQK

SEQ ID NO: 931 - protein, 4 aa, Human coronavirus
SAAR

SEQ ID NO: 932 - protein, 6 aa, Human coronavirus
VHFRAH

SEQ ID NO: 933 - protein, 6 aa, Human coronavirus
CCILQV

SEQ ID NO: 934 - protein, 4 aa, Human coronavirus
TDCR

SEQ ID NO: 935 - protein, 24 aa, Human coronavirus
HLRTYLSLCGYLDGAHNCESREVC

SEQ ID NO: 936 - protein, 11 aa, Human coronavirus
NYWVVPNHYGT

SEQ ID NO: 937 - protein, 14 aa, Human coronavirus
RVRKSCCQLPKIRL

SEQ ID NO: 938 - protein, 38 aa, Human coronavirus
ICHCSGTTWHWQKSFCYRVSDLLPYSTCCLYSMFTRSC

SEQ ID NO: 939 - protein, 5 aa, Human coronavirus
IFEHC

SEQ ID NO: 940 - protein, 11 aa, Human coronavirus
MFPYHSCKGTC

SEQ ID NO: 941 - protein, 7 aa, Human coronavirus
DKFSIFV

SEQ ID NO: 942 - protein, 12 aa, Human coronavirus
CSTRNFCRYSGG

SEQ ID NO: 943 - protein, 4 aa, Human coronavirus
SFNY

SEQ ID NO: 944 - protein, 14 aa, Human coronavirus
AHCLCRRSSTVASS

SEQ ID NO: 945 - protein, 4 aa, Human coronavirus
DFVD

SEQ ID NO: 946 - protein, 9 aa, Human coronavirus
RHIGTRKFQ

SEQ ID NO: 947 - protein, 10 aa, Human coronavirus
HIFKYVLQVS

SEQ ID NO: 948 - protein, 12 aa, Human coronavirus
GNSKHCERSCLQ

SEQ ID NO: 949 - protein, 12 aa, Human coronavirus
IVSQEGAFRPVL

SEQ ID NO: 950 - protein, 5 aa, Human coronavirus
GQCDA

SEQ ID NO: 951 - protein, 17 aa, Human coronavirus
TTTHICEEFYYCQSGME

SEQ ID NO: 952 - protein, 25 aa, Human coronavirus
GSLYFALQFTECCVSFNAGSYHSDC

SEQ ID NO: 953 - protein, 21 aa, Human coronavirus
FLTGFRIPVRYLLSNSRYGTC

SEQ ID NO: 954 - protein, 20 aa, Human coronavirus
CCNHSCPKRYSLCYDISGTL

SEQ ID NO: 955 - protein, 5 aa, Human coronavirus
VLRVY

SEQ ID NO: 956 - protein, 4 aa, Human coronavirus
IVFY

SEQ ID NO: 957 - protein, 12 aa, Human coronavirus
LQAPVSDCNWPF

SEQ ID NO: 958 - protein, 14 aa, Human coronavirus
RNFWPLTCLCTNIC

SEQ ID NO: 959 - protein, 5 aa, Human coronavirus
ALRES

SEQ ID NO: 960 - protein, 16 aa, Human coronavirus
FTRKCPILSCYFQDGL

SEQ ID NO: 961 - protein, 9 aa, Human coronavirus
TRCNSSWIS

SEQ ID NO: 962 - protein, 5 aa, Human coronavirus
AFHYS

SEQ ID NO: 963 - protein, 14 aa, Human coronavirus
RGCKASSKLDRLRC

SEQ ID NO: 964 - protein, 6 aa, Human coronavirus
GCSCFP

SEQ ID NO: 965 - protein, 28 aa, Human coronavirus
CMWHQCASTIRIFNWCELCCSASWCCRH

SEQ ID NO: 966 - protein, 12 aa, Human coronavirus
HVNGHCCTSSTR

SEQ ID NO: 967 - protein, 7 aa, Human coronavirus
APRASYA

SEQ ID NO: 968 - protein, 7 aa, Human coronavirus
GGCVAYC

SEQ ID NO: 969 - protein, 15 aa, Human coronavirus
TTYSANVVRHFRQIV

SEQ ID NO: 970 - protein, 11 aa, Human coronavirus
LLYVCLLGSWL

SEQ ID NO: 971 - protein, 11 aa, Human coronavirus
INVCIILLQDR

SEQ ID NO: 972 - protein, 8 aa, Human coronavirus
GTEVLHVQ

SEQ ID NO: 973 - protein, 21 aa, Human coronavirus
TRCSVLFTSAILCLLDSFLRL

SEQ ID NO: 974 - protein, 21 aa, Human coronavirus
LCLQPFLCRCSTVGLCRQSCY

SEQ ID NO: 975 - protein, 15 aa, Human coronavirus
SRSLLLCPSRSSCGF

SEQ ID NO: 976 - protein, 28 aa, Human coronavirus
CNNDSLFSYSFLFYRTCGLGYRVSLYLT

SEQ ID NO: 977 - protein, 7 aa, Human coronavirus
KEIEFLL

SEQ ID NO: 978 - protein, 13 aa, Human coronavirus
AQRRTCCSSCRFI

SEQ ID NO: 979 - protein, 4 aa, Human coronavirus
YWQS

SEQ ID NO: 980 - protein, 5 aa, Human coronavirus
RNSYC

SEQ ID NO: 981 - protein, 4 aa, Human coronavirus
LALF

SEQ ID NO: 982 - protein, 22 aa, Human coronavirus
CTALDQEGTTAFLYRGHGLKIC

SEQ ID NO: 983 - protein, 8 aa, Human coronavirus
WALLILEL

SEQ ID NO: 984 - protein, 5 aa, Human coronavirus
CTKIS

SEQ ID NO: 985 - protein, 6 aa, Human coronavirus
CNCMQV

SEQ ID NO: 986 - protein, 5 aa, Human coronavirus
HTCAF

SEQ ID NO: 987 - protein, 6 aa, Human coronavirus
VQFARL

SEQ ID NO: 988 - protein, 9 aa, Human coronavirus
QARFSYTSI

SEQ ID NO: 989 - protein, 5 aa, Human coronavirus
CECIP

SEQ ID NO: 990 - protein, 14 aa, Human coronavirus
SETFTILLLFYYTM

SEQ ID NO: 991 - protein, 5 aa, Human coronavirus
YDRGY

SEQ ID NO: 992 - protein, 13 aa, Human coronavirus
LCTPKICSLYYSL

SEQ ID NO: 993 - protein, 6 aa, Human coronavirus
FRGRCL

SEQ ID NO: 994 - protein, 13 aa, Human coronavirus
EACYRVQRVYGSI

SEQ ID NO: 995 - protein, 12 aa, Human coronavirus
SCLCIRFPPLVL

SEQ ID NO: 996 - protein, 16 aa, Human coronavirus
SLVYFYKSSRFGKHCF

SEQ ID NO: 997 - protein, 7 aa, Human coronavirus
TRPFYWC

SEQ ID NO: 998 - protein, 7 aa, Human coronavirus
TTCSCSQ

SEQ ID NO: 999 - protein, 7 aa, Human coronavirus
DLHQEWR

SEQ ID NO: 1000 - protein, 4 aa, Human coronavirus
HLYV

SEQ ID NO: 1001 - protein, 5 aa, Human coronavirus
NHFAY

SEQ ID NO: 1002 - protein, 28 aa, Human coronavirus
ACCTLASRFQIATQFTSRHLLQVRPLGL

SEQ ID NO: 1003 - protein, 11 aa, Human coronavirus
QYLWYCYYWCM

SEQ ID NO: 1004 - protein, 7 aa, Human coronavirus
FSFEYMF

SEQ ID NO: 1005 - protein, 16 aa, Human coronavirus
LFIGEVHVYSQCHLYF

SEQ ID NO: 1006 - protein, 11 aa, Human coronavirus
KNQEIPLYGRS

SEQ ID NO: 1007 - protein, 10 aa, Human coronavirus
LCLLQWCYHP

SEQ ID NO: 1008 - protein, 8 aa, Human coronavirus
TTSEVLLV

SEQ ID NO: 1009 - protein, 9 aa, Human coronavirus
VYLHSESLL

SEQ ID NO: 1010 - protein, 5 aa, Human coronavirus
LPTPF

SEQ ID NO: 1011 - protein, 8 aa, Human coronavirus
HGERLSIF

SEQ ID NO: 1012 - protein, 9 aa, Human coronavirus
EVWLGKLCF

SEQ ID NO: 1013 - protein, 38 aa, Human coronavirus
ARSLWRLLSYYVRRSSLAYWFIQEATGRSYYYGRNAKR

SEQ ID NO: 1014 - protein, 4 aa, Human coronavirus
LNYS

SEQ ID NO: 1015 - protein, 4 aa, Human coronavirus
LFYY

SEQ ID NO: 1016 - protein, 4 aa, Human coronavirus
HSGF

SEQ ID NO: 1017 - protein, 10 aa, Human coronavirus
GGVFCYRFKA

SEQ ID NO: 1018 - protein, 22 aa, Human coronavirus
RLCYDFKESRPWRSIQGCQGSY

SEQ ID NO: 1019 - protein, 4 aa, Human coronavirus
LNND

SEQ ID NO: 1020 - protein, 5 aa, Human coronavirus
VYVMV

SEQ ID NO: 1021 - protein, 27 aa, Human coronavirus
GWTGSNLLPSTPGFCRLETWSCNAIPL

SEQ ID NO: 1022 - protein, 6 aa, Human coronavirus
SSKCKP

SEQ ID NO: 1023 - protein, 16 aa, Human coronavirus
LQAIYSYASRCAHEHR

SEQ ID NO: 1024 - protein, 28 aa, Human coronavirus
IYAIVPVFKYLHISRACQYACYTFWRWF

SEQ ID NO: 1025 - protein, 21 aa, Human coronavirus
RYRSWYLSFTTVASYRCHYYR

SEQ ID NO: 1026 - protein, 5 aa, Human coronavirus
VRVRC

SEQ ID NO: 1027 - protein, 24 aa, Human coronavirus
HNFIWRLCNCTCRPTSGSCYFRHV

SEQ ID NO: 1028 - protein, 4 aa, Human coronavirus
ECNR

SEQ ID NO: 1029 - protein, 10 aa, Human coronavirus
VKGFILYLPV

SEQ ID NO: 1030 - protein, 9 aa, Human coronavirus
SCSWWVCCY

SEQ ID NO: 1031 - protein, 8 aa, Human coronavirus
NNRTLLER

SEQ ID NO: 1032 - protein, 20 aa, Human coronavirus
TYGKICLVDCFLHQCKCILI

SEQ ID NO: 1033 - protein, 6 aa, Human coronavirus
RIPLRY

SEQ ID NO: 1034 - protein, 5 aa, Human coronavirus
LLGYY

SEQ ID NO: 1035 - protein, 29 aa, Human coronavirus
RKYRWWCYARQLYILEKFHSYESEYLLTF

SEQ ID NO: 1036 - protein, 21 aa, Human coronavirus
FIQVSIKIKRNTSSSIKGESN

SEQ ID NO: 1037 - protein, 10 aa, Human coronavirus
RTRNISPVAG

SEQ ID NO: 1038 - protein, 4 aa, Human coronavirus
VTYP

SEQ ID NO: 1039 - protein, 6 aa, Human coronavirus
YTQCFY

SEQ ID NO: 1040 - protein, 8 aa, Human coronavirus
HLQKVTLM

SEQ ID NO: 1041 - protein, 45 aa, Human coronavirus
GQILLSLLVLRLIYNRLSLIKLGLGQLMFLRLTVLYTLKAVHILT

SEQ ID NO: 1042 - protein, 34 aa, Human coronavirus
LSLIKVFFPIRETMVICMFTLQDMLQAQLHKSCL

SEQ ID NO: 1043 - protein, 17 aa, Human coronavirus
LTILRTSNSLLMGLSSV

SEQ ID NO: 1044 - protein, 48 aa, Human coronavirus
EQLPIPLALLLLAHLPALLYEKFTLLLCWVLQLVISQMVKWAASSIIL

SEQ ID NO: 1045 - protein, 17 aa, Human coronavirus
FFCPMDVALYLELFIVF

SEQ ID NO: 1046 - protein, 37 aa, Human coronavirus
SLALEIIVLLAIPILLLPLITLLQQIVLMAITIVMPV

SEQ ID NO: 1047 - protein, 25 aa, Human coronavirus
TLLRSILIYVTAPLCTLITLPKMRF

SEQ ID NO: 1048 - protein, 69 aa, Human coronavirus
SGLALHKLLKVFTSSHLGMLICTAAICFNLPPCLFMILLSIILSFLTVFVLSKVIEKLGLPSTYINFNR

SEQ ID NO: 1049 - protein, 15 aa, Human coronavirus
LSCWIFLLMVIYAEL

SEQ ID NO: 1050 - protein, 82 aa, Human coronavirus
TVVLMICHNSTAHMNPSMLNLEFIQFRLSKQNLLAQLWNRLKVLNVIFHLFCLAHLLRFIISSVWFLPIAIIILPNCFHFFL

SEQ ID NO: 1051 - protein, 20 aa, Human coronavirus
MILLVVKYLQQQLLATVILH

SEQ ID NO: 1052 - protein, 10 aa, Human coronavirus
FWITFHTHLV

SEQ ID NO: 1053 - protein, 26 aa, Human coronavirus
NPISVLVLLVQYPSLIINSPFLIPHV

SEQ ID NO: 1054 - protein, 35 aa, Human coronavirus
RLFLITLLLLLSLLSTAILTSALVFFLMIVLKYLS

SEQ ID NO: 1055 - protein, 44 aa, Human coronavirus
TLINTHPVYPLSHPLCGKTVIIIGNNYLHLKVVAGLLLVAQLLP

SEQ ID NO: 1056 - protein, 36 aa, Human coronavirus
LSNYRWALVLQFNMVQTPIVFAPSLNLLMTQKLPLN

SEQ ID NO: 1057 - protein, 22 aa, Human coronavirus
AIAWNIPSMVFRAVVFFRIAQL

SEQ ID NO: 1058 - protein, 14 aa, Human coronavirus
VFDSSALFMMRTRI

SEQ ID NO: 1059 - protein, 76 aa, Human coronavirus
LAIILMMATTTVCVLVLVFLFLSSMIKKLKPTLLYLVVLHVNTFLLPCLNTPVLRDQCLNGEILHMAPFRHLLVVS

SEQ ID NO: 1060 - protein, 8 aa, Human coronavirus
DLLIPLCS

SEQ ID NO: 1061 - protein, 55 aa, Human coronavirus
RTASCLLVNLSVLFLTHLVLSHLAVCALFQVKCAWHPLLLIILFRLINLIVVILN

SEQ ID NO: 1062 - protein, 9 aa, Human coronavirus
VYPLIFPLV

SEQ ID NO: 1063 - protein, 40 aa, Human coronavirus
LRSTFRQPFRKLLLIVNSTFAMVSRSVSNYCASMASFVPK

SEQ ID NO: 1064 - protein, 21 aa, Human coronavirus
TRLSMVPIYARMILYVICLRA

SEQ ID NO: 1065 - protein, 17 aa, Human coronavirus
KALNHLLSYQVLEVTLI

SEQ ID NO: 1066 - protein, 25 aa, Human coronavirus
NLFLYLLAVVVHVVLLRICYLTKSL

SEQ ID NO: 1067 - protein, 54 aa, Human coronavirus
LILVICKVTMIACSKVQHQLVILFVLNMWLVTKYYLLLWMLIWKPRILHLCLAA

SEQ ID NO: 1068 - protein, 24 aa, Human coronavirus
QVLAGLLAYPPLLLFHLHRVSFIG

SEQ ID NO: 1069 - protein, 45 aa, Human coronavirus
TVLALLNRFFQRTKSLLPISLIRLWELCKQASLQLMKLFRRFRML

SEQ ID NO: 1070 - protein, 9 aa, Human coronavirus
TTMHRLYPN

SEQ ID NO: 1071 - protein, 30 aa, Human coronavirus
LASYLILLVLFPPLLETSYNVLMFSNRTPK

SEQ ID NO: 1072 - protein, 7 aa, Human coronavirus
TDLLMAV

SEQ ID NO: 1073 - protein, 44 aa, Human coronavirus
MLLLHSSLFVPNQLLFPLNWLKIKSMSVSRHNPSVLDFAVKAHI

SEQ ID NO: 1074 - protein, 4 aa, Human coronavirus
CPLL

SEQ ID NO: 1075 - protein, 36 aa, Human coronavirus
MPLMAFTSCMLVITLATTLRLFLLMVFAMQLTLLIV

SEQ ID NO: 1076 - protein, 43 aa, Human coronavirus
PLLMATLLKLITLGLLMSGHILARPSMHLSPLPPLILSMLHHR

SEQ ID NO: 1077 - protein, 42 aa, Human coronavirus
HTKTFLLTSLLLFSAIPPGLTSKMSWMSFSKMLAPVYLILVP

SEQ ID NO: 1078 - protein, 28 aa, Human coronavirus
HRLILHYSILPTRCCLFNKLLKPLMSLT

SEQ ID NO: 1079 - protein, 28 aa, Human coronavirus
TLKSLAIILITTNGRGTFGLVSLLGLLP

SEQ ID NO: 1080 - protein, 44 aa, Human coronavirus
LYASSSYCAALVVAQTVWENLSVIVVVIDTRNTTSSRIRFMFTN

SEQ ID NO: 1081 - protein, 32 aa, Human coronavirus
RTINESSKTTHSLVSVFTLSFGHCILKTSLCT

SEQ ID NO: 1082 - protein, 10 aa, Human coronavirus
ALSELFWLHA

SEQ ID NO: 1083 - protein, 4 aa, Human coronavirus
NCPS

SEQ ID NO: 1084 - protein, 10 aa, Human coronavirus
YSWSLYKFSN

SEQ ID NO: 1085 - protein, 16 aa, Human coronavirus
RPICRINWYSISFCRS

SEQ ID NO: 1086 - protein, 5 aa, Human coronavirus
VNFNS

SEQ ID NO: 1087 - protein, 7 aa, Human coronavirus
WSYRTCY

SEQ ID NO: 1088 - protein, 4 aa, Human coronavirus
CESF

SEQ ID NO: 1089 - protein, 5 aa, Human coronavirus
RWLLS

SEQ ID NO: 1090 - protein, 113 aa, Human coronavirus
LTNSMDYVSLLNQIWQKYLNSPYTTCLYIPKPTAKYTPLVGTSLHPVLWNCQLSFAGYTESAVNSTKALAKQDAAQRIAWLLHKDGGIPDGCSLYLRHSSLFAQSEEEEPFSN

SEQ ID NO: 1091 - protein, 5 aa, Human coronavirus
ETALR

SEQ ID NO: 1092 - protein, 6 aa, Human coronavirus
IFSSAP

SEQ ID NO: 1093 - protein, 34 aa, Human coronavirus
CYCPTNTLCQGYIFRPQHVVSTFGSSFTLSSQLA

SEQ ID NO: 1094 - protein, 8 aa, Human coronavirus
TLWRPTCF

SEQ ID NO: 1095 - protein, 11 aa, Human coronavirus
VPYYSSFAKSH

SEQ ID NO: 1096 - protein, 14 aa, Human coronavirus
RFFTHCALFAQCQI

SEQ ID NO: 1097 - protein, 10 aa, Human coronavirus
VRLAAQNSCS

SEQ ID NO: 1098 - protein, 7 aa, Human coronavirus
CIRDLLC

SEQ ID NO: 1099 - protein, 6 aa, Human coronavirus
HGNPYY

SEQ ID NO: 1100 - protein, 12 aa, Human coronavirus
GLASRSGIFPLP

SEQ ID NO: 1101 - protein, 9 aa, Human coronavirus
WPPFTYVNL

SEQ ID NO: 1102 - protein, 5 aa, Human coronavirus
IACTG

SEQ ID NO: 1103 - protein, 12 aa, Human coronavirus
CYSQLHHYNAML

SEQ ID NO: 1104 - protein, 24 aa, Human coronavirus
NLPSTNVCYSFGRRCCLHTVFQSG

SEQ ID NO: 1105 - protein, 25 aa, Human coronavirus
TNCSFLSHFTSSRILTNYGFLGVFI

SEQ ID NO: 1106 - protein, 14 aa, Human coronavirus
TRPASPSFSCISSH

SEQ ID NO: 1107 - protein, 9 aa, Human coronavirus
LYCFHIHSC

SEQ ID NO: 1108 - protein, 40 aa, Human coronavirus
RLCSCFSCQCVSHSPIITATSRYLSSQHYQNYGSLFPCSV

SEQ ID NO: 1109 - protein, 33 aa, Human coronavirus
LFISHCTSQWCTLSNWKLPDSLLSYPHNTLVCR

SEQ ID NO: 1110 - protein, 14 aa, Human coronavirus
NSFLSHAEFLHSTV

SEQ ID NO: 1111 - protein, 8 aa, Human coronavirus
HAFPLYSC

SEQ ID NO: 1112 - protein, 18 aa, Human coronavirus
YSFFSWYGPCNTHQTIIY

SEQ ID NO: 1113 - protein, 25 aa, Human coronavirus
KLRSALQLFSLFLFALFHLYRVHLY

SEQ ID NO: 1114 - protein, 5 aa, Human coronavirus
PSFCN

SEQ ID NO: 1115 - protein, 44 aa, Human coronavirus
LLLKRQCFHCFRACNARFSSSSHNRPELAYRLSSSALLWVPCRG

SEQ ID NO: 1116 - protein, 49 aa, Human coronavirus
SISLSLDIWKTNYVTLCPRTNRVVHSKLFHFYRSMCYNTLGVYGFPYGY

SEQ ID NO: 1117 - protein, 21 aa, Human coronavirus
IMCAMYDRLQYPVSSARIILV

SEQ ID NO: 1118 - protein, 11 aa, Human coronavirus
YWTFSLCKIPG

SEQ ID NO: 1119 - protein, 5 aa, Human coronavirus
TPSTT

SEQ ID NO: 1120 - protein, 228 aa, Human coronavirus
RVGLTNSFIMSNMTQLTEAQIIAIIKDWNFAWSLIFLLITIVLQYGYPSRSMTVYVFKMFVLWLLWPSSMALSIFSAVYPIDLASQIISGIVAAVSAMMWISYFVQSIRLFMRTGSWWSFNPETNCLLNVPFGGTTVVRPLVEDSTSVTAVVTNGHLKMAGMHFGACDYDRLPNEVTVAKPNVLIALKMVKRQSYGTNSGVAIYHRYKAGNYRSPPITADIELALLRA

SEQ ID NO: 1121 - protein, 4 aa, Human coronavirus
EYLN

SEQ ID NO: 1122 - protein, 24 aa, Human coronavirus
RISISLLWHPLLHLVLFPLPITMI

SEQ ID NO: 1123 - protein, 159 aa, Human coronavirus
QIQTYLEVEDVIQNHELHQITLSLGTLGLPNTGKSLLPFHLGRVYLLMPILPLRKMLGIGGDRTEKLIPGMELSNWLPGGTSTTLELDPKQHSHSGLLRMASFGSMKMAPLMLLQLLGRGTLTMIQLLLHNSRPVLSFLKTSTLRGLEAIVNHLQEPLA

SEQ ID NO: 1124 - protein, 30 aa, Human coronavirus
AETLPDLVHKVQDQETLPAALLQVHLESEQ

SEQ ID NO: 1125 - protein, 9 aa, Human coronavirus
EVIYFTLIF

SEQ ID NO: 1126 - protein, 10 aa, Human coronavirus
TDYKPLSLAK

SEQ ID NO: 1127 - protein, 6 aa, Human coronavirus
SNRSQK

SEQ ID NO: 1128 - protein, 45 aa, Human coronavirus
SLRKMLLLLKIRCATSALPPKVSTWCKLLVFADQETSRETLVIFN

SEQ ID NO: 1129 - protein, 123 aa, Human coronavirus
INSALRTHVGPKLLSLLLQPVLLWVCRNLNLPIRTMMIMATLCTSFGTVEPLNLTQRIPTTISGWSFLSKILMPTKPSLRRKRNKRHQKKNQQTKCLNLQRSSVCKVASLSALAPVQVFSLVQ

SEQ ID NO: 1130 - protein, 45 aa, Human coronavirus
LMLTLISVTQSNKIAAIVCVWQPHLTIACPLLHRMESCCNYSAIR

SEQ ID NO: 1131 - protein, 6 aa, Human coronavirus
LIAMLY

SEQ ID NO: 1132 - protein, 9 aa, Human coronavirus
RLSPLLDCK

SEQ ID NO: 1133 - protein, 10 aa, Human coronavirus
TVPPGKSSTV

SEQ ID NO: 1134 - protein, 5 aa, Human coronavirus
NVNKK

SEQ ID NO: 1135 - protein, 4 aa, Human coronavirus
LLFN

SEQ ID NO: 1136 - protein, 5 aa, Human coronavirus
IRLIR

SEQ ID NO: 1137 - protein, 7 aa, Human coronavirus
FAKKKKK

SEQ ID NO: 1138 - protein, 766 aa, Homo sapiens
MKTPWKVLLGLLGAAALVTIITVPVVLLNKGTDDATADSRKTYTLTDYLKNTYRLKLYSLRWISDHEYLYKQENNILVFNAEYGNSSVFLENSTFDEFGHSINDYSISPDGQFILLEYNYVKQWRHSYTASYDIYDLNKRQLITEERIPNNTQWVTWSPVGHKLAYVWNNDIYVKIEPNLPSYRITWTGKEDIIYNGITDWVYEEEVFSAYSALWWSPNGTFLAYAQFNDTEVPLIEYSFYSDESLQYPKTVRVPYPKAGAVNPTVKFFVVNTDSLSSVTNATSIQITAPASMLIGDHYLCDVTWATQERISLQWLRRIQNYSVMDICDYDESSGRWNCLVARQHIEMSTTGWVGRFRPSEPHFTLDGNSFYKIISNEEGYRHICYFQIDKKDCTFITKGTWEVIGIEALTSDYLYYISNEYKGMPGGRNLYKIQLSDYTKVTCLSCELNPERCQYYSVSFSKEAKYYQLRCSGPGLPLYTLHSSVNDKGLRVLEDNSALDKMLQNVQMPSKKLDFIILNETKFWYQMILPPHFDKSKKYPLLLDVYAGPCSQKADTVFRLNWATYLASTENIIVASFDGRGSGYQGDKIMHAINRRLGTFEVEDQIEAARQFSKMGFVDNKRIAIWGWSYGGYVTSMVLGSGSGVFKCGIAVAPVSRWEYYDSVYTERYMGLPTPEDNLDHYRNSTVMSRAENFKQVEYLLIHGTADDNVHFQQSAQISKALVDVGVDFQAMWYTDEDHGIASSTAHQHIYTHMSHFIKQCFSLP

SEQ ID NO: 1139 - protein, 1352 aa, Bat coronavirus HKU5
MIRSVLVLMCSLTFIGNLTRGQSVDMGHNGTGSCLDSQVQPDYFESVHTTWPMPIDTSKAEGVIYPNGKSYSNITLTYTGLYPKANDLGKQYLFSDGHSAPGRLNNLFVSNYSSQVESFDDGFVVRIGAAANKTGTTVISQSTFKPIKKIYPAFLLGHSVGNYTPSNRTGRYLNHTLVILPDGCGTILHAFYCVLHPRTQQNCAGETNFKSLSLWDTPASDCVSGSYNQEATLGAFKVYFDLINCTFRYNYTITEDENAEWFGITQDTQGVHLYSSRKENVFRNNMFHFATLPVYQKILYYTVIPRSIRSPFNDRKAWAAFYIYKLHPLTYLLNFDVEGYITKAVDCGYDDLAQLQCSYESFEVETGVYSVSSFEASPRGEFIEQATTQECDFTPMLTGTPPPIYNFKRLVFTNCNYNLTKLLSLFQVSEFSCHQVSPSSLATGCYSSLTVDYFAYSTDMSSYLQPGSAGAIVQFNYKQDFSNPTCRVLATVPQNLTTITKPSNYAYLTECYKTSAYGKNYLYNAPGAYTPCLSLASRGFSTKYQSHSDGELTTTGYIYPVTGNLQMAFIISVQYGTDTNSVCPMQALRNDTSIEDKLDVCVEYSLHGITGRGVFHNCTSVGLRNQRFVYDTFDNLVGYHSDNGNYYCVRPCVSVPVSVIYDKASNSHATLFGSVACSHVTTMMSQFSRMTKTNLLARTTPGPLQTTVGCAMGFINSSMVVDECQLPLGQSLCAIPPTTSSRVRRATSGASDVFQIATLNFTSPLTLAPINSTGFVVAVPTNFTFGVTQEFIETTIQKITVDCKQYVCNGFKKCEDLLKEYGQFCSKINQALHGANLRQDESIANLFSSIKTQNTQPLQAGLNGDFNLTMLQIPQVTTGERKYRSTIEDLLFNKVTIADPGYMQGYDECMQQGPQSARDLICAQYVAGYKVLPPLYDPYMEAAYTSSLLGSIAGASWTAGLSSFAAIPFAQSIFYRLNGVGITQQVLSENQKIIANKFNQALGAMQTGFTTTNLAFNKVQDAVNANAMALSKLAAELSNTFGAISSSISDILARLDTVEQEAQIDRLINGRLTSLNAFVAQQLVRTEAAARSAQLAQDKVNECVKSQSKRNGFCGTGTHIVSFAINAPNGLYFFHVGYQPTSHVNATAAYGLCNTENPQKCIAPIDGYFVLNQTTSTVADSDQQWYYTGSSFFHPEPITEANSKYVSMDVKFENLTNRLPPPLLSNSTDLDFKEELEEFFKNVSSQGPNFQEISKINTTLLNLNTELMVLSEVVKQLNESYIDLKELGNYTFYQKWPWYIWLGFIAGLVALALCVFFILCCTGCGTSCLGKLKCNRCCDSYDEYEVEKIHVH

SEQ ID NO: 1140 - protein, 1352 aa, Bat coronavirus HKU4
MTLLMCLLMSLLIFVRGCDSQFVDMSPASNTSECLESQVDAAAFSKLMWPYPIDPSKVDGIIYPLGRTYSNITLAYTGLFPLQGDLGSQYLYSVSHAVGHDGDPTKAYISNYSLLVNDFDNGFVVRIGAAANSTGTIVISPSVNTKIKKAYPAFILGSSLTNTSAGQPLYANYSLTIIPDGCGTVLHAFYCILKPRTVNRCPSGTGYVSYFIYETVHNDCQSTINRNASLNSFKSFFDLVNCTFFNSWDITADETKEWFGITQDTQGVHLYSSRKGDLYGGNMFRFATLPVYEGIKYYTVIPRSFRSKANKREAWAAFYVYKLHQLTYLLDFSVDGYIRRAIDCGHDDLSQLHCSYTSFEVDTGVYSVSSYEASATGTFIEQPNATECDFSPMLTGVAPQVYNFKRLVFSNCNYNLTKLLSLFAVDEFSCNGISPDSIARGCYSTLTVDYFAYPLSMKSYIRPGSAGNIPLYNYKQSFANPTCRVMASVLANVTITKPHAYGYISKCSRLTGANQDVETPLYINPGEYSICRDFSPGGFSEDGQVFKRTLTQFEGGGLLIGVGTRVPMTDNLQMSFIISVQYGTGTDSVCPMLDLGDSLTITNRLGKCVDYSLYGVTGRGVFQNCTAVGVKQQRFVYDSFDNLVGYYSDDGNYYCVRPCVSVPVSVIYDKSTNLHATLFGSVACEHVTTMMSQFSRLTQSNLRRRDSNIPLQTAVGCVIGLSNNSLVVSDCKLPLGQSLCAVPPVSTFRSYSASQFQLAVLNYTSPIVVTPINSSGFTAAIPTNFSFSVTQEYIETSIQKVTVDCKQYVCNGFTRCEKLLVEYGQFCSKINQALHGANLRQDESVYSLYSNIKTTSTQTLEYGLNGDFNLTLLQVPQIGGSSSSYRSAIEDLLFDKVTIADPGYMQGYDDCMKQGPQSARDLICAQYVSGYKVLPPLYDPNMEAAYTSSLLGSIAGAGWTAGLSSFAAIPFAQSMFYRLNGVGITQQVLSENQKLIANKFNQALGAMQTGFTTSNLAFSKVQDAVNANAQALSKLASELSNTFGAISSSISDILARLDTVEQDAQIDRLINGRLISLNAFVSQQLVRSETAARSAQLASDKVNECVKSQSKRNGFCGSGTHIVSFVVNAPNGFYFFHVGYVPTNYTNVTAAYGLCNNNNPPLCIAPIDGYFITNQTTTYSVDTEWYYTGSSFYKPEPITQANSRYVSSDVKFDKLENNLPPPLLENSTDVDFKDELEEFFKNVTSHGPNFAEISKINTTLLDLSDEMAMLQEVVKQLNDSYIDLKELGNYTYYNKWPWYVWLGFIAGLVALLLCVFFLLCCTGCGTSCLGKMKCKNCCDSYEEYDVEKIHVH

SEQ ID NO: 1141 - protein, 231 aa, Human coronavirus
SGVYSVSSFEAKPSGSVVEQAEGVECDFSPLLSGTPPQVYNFKRLVFTNCNYNLTKLLSLFSVNDFTCSQISPAAIASNCYSSLILDYFSYPLSMKSDLSVSSAGPISQFNYKQSFSNPTCLILATVPHNLTTITKPLKYSYINKCSRLLSDDRTEVPQLVNANQYSPCVSIVPSTVWEDGDYYRKQLSPLEGGGWLVASGSTVAMTEQLQMGFGITVQYGTDTNSVCPKL

SEQ ID NO: 1142 - protein, 221 aa, Bat coronavirus HKU5
TGVYSVSSFEASPRGEFIEQATTQECDFTPMLTGTPPPIYNFKRLVFTNCNYNLTKLLSLFQVSEFSCHQVSPSSLATGCYSSLTVDYFAYSTDMSSYLQPGSAGAIVQFNYKQDFSNPTCRVLATVPQNLTTITKPSNYAYLTECYKTSAYGKNYLYNAPGAYTPCLSLASRGFSTKYQSHSDGELTTTGYIYPVTGNLQMAFIISVQYGTDTNSVCPMQ

SEQ ID NO: 1143 - protein, 231 aa, Bat coronavirus HKU4
TGVYSVSSYEASATGTFIEQPNATECDFSPMLTGVAPQVYNFKRLVFSNCNYNLTKLLSLFAVDEFSCNGISPDSIARGCYSTLTVDYFAYPLSMKSYIRPGSAGNIPLYNYKQSFANPTCRVMASVLANVTITKPHAYGYISKCSRLTGANQDVETPLYINPGEYSICRDFSPGGFSEDGQVFKRTLTQFEGGGLLIGVGTRVPMTDNLQMSFIISVQYGTGTDSVCPML
